(19) United States
(12) Patent Application Publication
(10) Pub. No.: US 2025/0136656 A1
(43) Pub. Date: May 1, 2025

(54) PEPTIDE PHARMACEUTICALS FOR INSULIN RESISTANCE

(71) Applicant: Mederis Diabetes LLC, Sugar Land, TX (US)

(72) Inventor: John J. NESTOR, Sugar Land, TX (US)

(73) Assignee: Mederis Diabetes LLC, Sugar Land, TX (US)

(21) Appl. No.: 18/943,440

(22) Filed: Nov. 11, 2024

Related U.S. Application Data
(63) Continuation of application No. 16/747,759, filed on Jan. 21, 2020, now abandoned.
Application No. 16/747,759 is a continuation of application No. 15/820,127, filed on Nov. 21, 2017, now Pat. No. 10,577,405.
Application No. 15/820,127 is a continuation of application No. 15/314,466, filed on Nov. 28, 2016, now Pat. No. 9,856,306.
(60) Provisional application No. 62/004,156, filed on May 28, 2014.

(51) Int. Cl. C07K 14/605; A61K 38/00; A61K 38/26; A61K 47/54; A61K 47/64

(52) U.S. Cl. CPC C07K 14/605; A61K 38/26; A61K 47/549; A61K 47/64; A61K 38/00

(57) ABSTRACT

Described herein are methods of syntheses and therapeutic uses of covalently modified peptides and/or proteins. The covalently modified peptides and/or proteins allow for improved pharmaceutical properties of peptide and protein-based therapeutics.

### RELATED APPLICATIONS

[0001] This application is a continuation of U.S. application Ser. No. 15/314,466, filed Nov. 28, 2016, which is a U.S. National Stage Entry of PCT/US2015/033042, filed May 28, 2015, entitled “IMPROVED PEPTIDE PHARMACEUTICALS FOR INSULIN RESISTANCE” which claims the benefit of priority from U.S. Provisional Patent Application No. 62/004,156, filed May 28, 2014, entitled “PEPTIDE PHARMACEUTICALS FOR INSULIN RESISTANCE”, all of which are incorporated herein by reference in their entirety.

### SEQUENCE LISTING

[0002] The instant application contains a Sequence Listing which has been submitted electronically in XML format and is hereby incorporated by reference in its entirety. Said XML copy, created on Nov. 11, 2024, is named MED005US4.XML and is 3,592,835 bytes in size.

### FIELD OF THE INVENTION

[0003] The increasing prevalence of diabetes mellitus is a world health crisis of epidemic proportions that is a major contributor to patient morbidity and mortality and a major economic burden. Obesity is an important risk factor for type 2 diabetes mellitus, and roughly 90% of patients with type 2 diabetes are overweight or obese. Obesity is a rapidly increasing problem worldwide and currently more than 65% of adults in the U.S. are overweight (Hedley, A. A., et at (2004) JAMA 291: 2847-2850). There is a need for development of safe and efficacious pharmaceutical treatments for obesity and diabetes mellitus.

### SUMMARY OF THE INVENTION

[0004] Described herein are compositions and methods for treatment or prevention of disorders associated with the insulin resistance including and not limited to obesity, Syndrome X, the metabolic syndrome, insulin resistance, type 2 diabetes, hypertension, cardioprotection, atherosclerosis, myocardial infarction, beta cell protection, or the like. In some embodiments, the methods include prophylactic and/or therapeutic treatment with peptides and/or proteins. Peptide and/or protein pharmaceuticals often suffer from several limitations in their use in medicine (Nestor, J. J., Jr. (2007) Comprehensive Medicinal Chemistry TT 2: 573-601)—short duration of action, poor bioavailability, and lack of receptor subtype selectivity. In addition, peptides and/or proteins are unstable in formulations, often being subject to aggregation.

[0005] Described herein are certain covalently modified peptides and/or proteins (for example, GLP-1, glucagon, related analogs or the like) that allow for longer duration of action and/or improved bioavailability upon administration of the modified peptides and/or proteins. Such covalently modified peptides and/or proteins are suitable for prevention and/or treatment of conditions associated with obesity, the metabolic syndrome, insulin resistance, type 2 diabetes, hypertension, atherosclerosis, or the like.

[0006] In some embodiments, the covalently modified peptides and/or proteins described herein are attached to glycoside surfactants. In one aspect, the covalently modified peptides and/or proteins are attached to a glycoside surfactant wherein the peptide and/or protein is attached to the glycoside in the surfactant and the glycoside is then attached to a hydrophobic group. Also provided herein, in some embodiments, are reagents and intermediates for synthesis of modified peptides and/or proteins (e.g., modified GLP-1, glucagon, oxyntomodulin, analogs of glucagon, oxyntomodulin or GLP-1, or the like) through the incorporation of surfactants.

[0007] Provided herein, in some embodiments, are peptide products comprising a surfactant X, covalently attached to a peptide, the peptide comprising a linker amino acid U and at least one other amino acid:

[chemical structure]

[0008] wherein the surfactant X is a group of Formula I:

[chemical structure]

[0009] wherein:
   [0010] R^{1a} is independently, at each occurrence, a bound, H, a protecting group, a substituted or unsubstituted C₁-C₃₀, alkyl group, a saccharide, a substituted or unsubstituted alkoxyaryl group, or a substituted or unsubstituted aralkyl group;
   [0011] R^{1b}, R^{1c}, and R^{1d} are each, independently at each occurrence, a bond, H, a protecting group, a substituted or unsubstituted C₁-C₃₀ alkyl group, a substituted or unsubstituted alkoxyaryl group, or a substituted or unsubstituted aralkyl group;
   [0012] W¹ is independently, at each occurrence, —CH₂—; —CH₂—O—, —(C═O), —(C═O)—O—, —(C═O)—NH—, —(C═S)—, —(C═S)—NH—, or —CH₂—S—;
   [0013] W² is —O—, —CH₂— or —S—;
   [0014] R² is independently, at each occurrence, a bond to U, H, a substituted or unsubstituted C₁-C₃₀ alkyl group, a substituted or unsubstituted aikoxyaryl group, or a substituted or unsubstituted aralkyl group, —NH, —S—, -triazolo-, —NH(C═O)—CH₂—, —(CH₂)ₘ-maleimide-;
   [0015] n is 1, 2 or 3; and
   [0016] m is an integer of 1-10;
[0017] the peptide is selected from Formula II:

aa₁-aa₂-aa₃-aa₄-aa₅-aa₆-aa₇-aa₈-aa₉-aa₁₀-aa₁₁-aa₁₂-aa₁₃-aa₁₄-aa₁₅-aa₁₆-aa₁₇-aa₁₈-aa₁₉-aa₂₀-aa₂₁-aa₂₂-aa₂₃-aa₂₄-aa₂₅-aa₂₆-aa₂₇-aa₂₈-aa₂₉-aa₃₀-aa₃₁-aa₃₂-aa₃₃aa₃₄-aa₃₅-aa₃₆-aa₃₇-Z Formula II (SEQ. ID. NO. 1108)
[0018] wherein:
   [0019] Z is OH, N—R⁴-His, or —NH—R³,
      [0020] wherein
      [0021] R³ is H, C₁-C₁₂ substituted or unsubstituted alkyl, or a PEG chain of less than 10 Da; and
      [0022] R⁴ is a C₂-C₁₀ acyl group, for example Ac or Bz;
   [0023] aa₁ is His, N—R—His, pGlu-His, or N—R³-His;
   [0024] aa₂ is Ser, D-Ser, Ala, Gly, Pro, MePro, Aib, Ac4c, or Ac5c;
   [0025] aa₃ is Gln, or Cit;
   [0026] aa₄ is Gly, or D-Ala;
   [0027] aa₅ is Thr, or Ser;
   [0028] aa₆ is Phe, Trp, 2FPhe, MePhe, 2FMePhe, or Nal2;
   [0029] aa₇ is Thr, or Ser;
   [0030] aa₈ is Ser, or Asp;
   [0031] aa₉ is Asp, or Glu;
   [0032] aa₁₀ is Tyr, Leu, Met, Nal2, Bip, Bip2EtMeO, Glu, Lys or UT;
   [0033] aa₁₁ is absent or Ser, Asn, Bip or U;
   [0034] aa₁₂ is absent or Lys, Glu, Ser, Arg, or U;
   [0035] aa₁₃ is absent or Tyr, Gln, Cit. or U;
   [0036] aa₁₄ is absent or Len, Met, Nle, Glu, Lys or U;
   [0037] aa₁₅ is absent or Asp, Glu, or U;
   [0038] aa₁₆ is absent or Ser, Gly, Glu, Ala, Aib, Ac5c, Lys, Arg, or U;
   [0039] aa₁₇ is absent or Arg, hArg, Gln, Glu, Cit, Aib, Ac4c, Ac5c, Lys, or U;
   [0040] aa₁₈ is absent or Arg, hArg, Ala, Aib, Ac4c, Ac5c, or U;
   [0041] aa₁₉ is absent or Ala, Val, Aib, Ac4c, Ac5c, or U;
   [0042] aa₂₀ is absent or Gln, Lys. Arg, Cit, Gln, Aib, Ac4c. Ac5c, or U;
   [0043] aa₂₁ is absent or Asp, Glu, Len, Aib, Ac4c, Ac5c, or U;
   [0044] aa₂₂ is absent or Phe, Trp, Nal2, Aib, Ac4c, Ac5c, or U
   [0045] aa₂₃ is absent or Val, Ile, Aib, Ac4c, Ac5c, or U;
   [0046] aa₂₄ is absent or Ala, Gln, Glu, Cit, or U;
   [0047] aa₂ is absent or Trp, Nal2, or U;
   [0048] aaz₆ is absent or Leu, or U;
   [0049] aa₂₇ is absent or Met. Val, Leu, Nle, Lys, or U;
   [0050] aa₂₈ is absent or Asn, Lys, Glu, Gln, Cit, or U;
   [0051] aa₂₉ is absent or Thr, Gly, Aib, Ac4c, Ac5c, or U;
   [0052] aa₃₀ is absent or Lys, Aib, Ac4c, Ac5c, Arg, or U;
   [0053] aa₃₁ is absent or Arg, Aib, Ac4c, Ac5c, or U;
   [0054] aa₃₂ is absent or Asn, Aib, Ac4c, Ac5c, or U;
   [0055] aa₃₃ is absent or Arg, Aib, Ac4c, Ac5c, or U;
   [0056] aa₃₄ is absent or Asn, Aib, Ac4c, Ac5c, or U;
   [0057] aa₃₅ is absent or Asn, Aib, Ac4c, Ac5c, or U;
   [0058] aa₃₆ is absent or lie, Aib, Ac4c, Ac5C₁, or U;
   [0059] aa₃₆ is absent or Ala, Aib, Ac4c, Ac5C, or U;
   [0060] aa₃₇ absent or U;
   [0061] U is a natural or unnatural amino acid comprising a functional group used for covalent attachment to the surfactant X;
[0062] wherein any two of aa₁-aa₃₇ are optionally cyclized through their side chains to form a lactam linkage; and
[0063] provided that one, or at least one of aa₁₀-aa₃₇ is the linker amino acid U covalently attached to X.

[0064] In some embodiments, n is 1. In some embodiments, n is 2, and a first glycoside is attached to a second glycoside via bond between W² of the first glycoside and any one of OR^{1b}, OR^{1c} or OR^{1d} of the second glycoside. In some embodiments, n is 3, and a first glycoside is attached to a second glycoside via bond between W² of the first glycoside and any one of OR^{1b}, OR^{1c} or OR^{1d} of the second glycoside, and the second glycoside is attached to a third glycoside via bond between W² of the second glycoside and any one of OR^{1b}, OR^{1c} or OR^{1d} of the third glycoside.

[0065] In one embodiment, compounds of Formula I-A are compounds wherein X has the structure:

[chemical structure]

[0066] wherein:
   [0067] R^{1a} is H, a protecting group, a saccharide, a substituted or unsubstituted C₁-C₃₀ alkyl group, or a steroid nucleus containing moiety;
[0068] R^{1b}, R^{1c}, and R^{1d} are each, independently at each occurrence, H, a protecting group, or a substituted or unsubstituted C₁-C₃₀ alkyl group; W¹ is independently, at each occurrence, —CH₂—, —CH₂—O—, —(C═O), —(C═O)—O—, —(C═O)—NH—, —(C═S)—, —(C═S)—NH—, or —CH₂—S—;
   [0069] W² is —O—, —S—;
   [0070] R² is a bond, —NH—, —S—, —NH(C═O)—CH₂— or —(CH₂)ₘ, -maleimide- and
   [0071] m is 1-10.

[0072] In another embodiment, compounds of Formula I-A are compounds wherein X has the structure:

[chemical structure]

[0073] Accordingly, in the embodiment described above, R² is a bond.

[0074] For instance, in an exemplary embodiment of the structure of X described above, W¹ is —C(═O)NH—, R² is a bond between W¹ and an amino acid residue U within the peptide (e.g., an amino group in the sidechain of a lysine residue present in the peptide).

[0075] In a further embodiment, compounds of Formula I-A are compounds wherein X has the structure:

[chemical structure]

[0076] For instance, in an exemplary embodiment of the structure of X described above, W¹ is —CH₂— and R² is an alkyl-linked maleimide functional group on X and R is attached to a suitable moiety of an amino acid residue U within the peptide (e.g., a thiol group in a cysteine residue of the peptide forms a thioether with the maleimide on X).

[0077] In yet another embodiment, compounds of Formula I-A are compounds wherein X has the structure:

[chemical structure]

[0078] wherein:
   [0079] R^{1a} is H, a protecting group, a saccharide, a substituted or unsubstituted C₁-C₃₀ alkyl group, or a steroid nucleus containing moiety;
   [0080] R^{1b}, R^{1c}, and R^{1d} are each, independently at each occurrence, H, a protecting group, or a substituted or unsubstituted C₁-C₃₀ alkyl group;
   [0081] W¹ is —(C═O)—NH—;
   [0082] W² is —O—;
   [0083] R² is a bond

[0084] In an additional embodiment, compounds of Formula I-A are compounds wherein X has the structure:

[chemical structure]

[0085] wherein:
   [0086] R^{1a} is a substituted or unsubstituted C₁-C₃₀ alkyl group;
   [0087] R^{1b}, R^{1c}, and R^{1d} are H;
   [0088] W¹ is —(C═O)—NH—;
   [0089] W² is —O—; and
   [0090] R² is a bond

[0091] In some embodiments described above and herein, R^{1a} is a substituted or unsubstituted C₁-C₃₀ alkyl group.

[0092] In some embodiments described above and herein, R^{1a} is a substituted or unsubstituted C₆-C₂₀ alkyl group.

[0093] In some embodiments described above and herein, R^{1a} is a saccharide. In some embodiments, the saccharide is a galactose. In certain embodiments, the saccharide is an alpha-linked galactose. In other embodiments, the saccharide is alpha-linked galactopyranose, beta-linked galactopyranose, alpha-linked galactofuranose, or beta-linked galactofuranose.

[0094] Also contemplated herein are alternate embodiments wherein X in Formula I-A has the structure:

[chemical structure]

[0095] For instance, in an exemplary embodiment of the structure of X described above, W¹ is —S—, R² is a C₁-C₃₀ alkyl group, W² is S, R^{1a} is a bond between W² and a suitable moiety of an amino acid residue U within the peptide (e.g., a thiol group in a cysteine residue of the peptide forms a thioether with X).

[0096] In another exemplary embodiment of the structure of X described above, W² is —O—, R² is a C₁-C₃₀ alkyl group, W² is O, R^{1a} is a bond between W² and a suitable moiety of an amino acid residue U within the peptide (e.g., a hydroxyl group in a serine or threonine residue of the peptide forms an ether with X).

[0097] In another exemplary embodiment of the structure of X described above, W² is —O—, R² is a C₁-C₃₀ alkyl group, W is CO, R² is a spacer amino acid structure such as Glum or Lysₘ that links to a suitable moiety of an amino acid residue U within the peptide (for example, a Glu spacer linked through its gamma CO to the epsilon amino function of a Lys in the peptide or a Lys linked through its alpha CO to a the epsilon amino function of a Lys in the peptide).

[0098] In some embodiments, U is used for covalent attachment to X and is a dibasic natural or unnatural amino acid, a natural or unnatural amino acid comprising a thiol, an unnatural amino acid comprising a —N₃ group, an unnatural amino acid comprising an acetylenic group, or an unnatural amino acid comprising a —NH—C(═O)—CHL₂-Br or a —(CH₂)ₘ-maleimide, wherein m is 1-10.

[0099] In some embodiments of the peptide product, the surfactant is a 1-alkyl glycoside class surfactant. In some embodiments of the peptide product, the surfactant is attached to the peptide via an amide bond.

[0100] In some embodiments of the peptide product, the surfactant X comprises 1-eicosyl beta-D-glucuronic acid, 1-octadecyl beta-D-glucuronic acid, 1-hexadecyl beta-D-glucuronic acid, 1-tetradecyl beta-D-glucuronic acid, 1-dodecyl beta D-glucuronic acid, 1-decyl beta-D-glucuronic acid, I-octyl beta-D-glucuronic acid, 1-eicosyl beta-D-diglucuronic acid, 1-octadecyl beta-D-diglucuronic acid, I-hexadecyl beta-D-diglucuronic acid, 1-tetradecyl beta-D-diglucuronic acid, I-dodecyl beta-D-diglucuronic acid, I-decyl beta-D-diglucuronic acid, 1-octyl beta-D-diglucuronic acid, or functionalized 1-eicosyl beta-D-glucose, 1-octadecyl beta-D-glucose, 1-hexadecyl beta-D-glucose, 1-tetradecyl beta-D-glucose, 1-dodecyl beta-D-glucose, 1-decyl beta-D-glucose, I-octyl beta-D-glucose, 1-eicosyl beta-D-nmaltoside, 1-octadecyl beta-D-maltoside, 1-hexadecyl beta-D-maltoside, 1-tetradecyl beta-D-maltoside, 1-dodecyl beta-D-maltoside, I-decyl beta-D-maltoside, 1-octyl beta-D-maltoside, I-eicosyl beta-D-muelibioside, 1-octadecyl beta-D-melibioside, 1-hexadecyl beta-D-melibioside, I-tetradecyl beta-D-melibioside, 1-dodecyl beta-D-melibioside, 1-decyl beta-D-melibioside, I-octyl beta-D-nmelibioside and the like, as well as the corresponding 6′ or 6′,6 carboxylic acids and the peptide product is prepared by formation of a linkage between the aforementioned groups and a group on the peptide (e.g., a —C^{OOH group in the aforementioned groups and an amino group of the peptide). In some embodiments, the surfactant X is} 1-tetradecyl beta-D-maltoside, 1-dodecyl beta-D-maltoside, 1-decyl beta-D-maltoside, 1-octyl beta-D-maitoside, 1-eicosyl beta-D-melibioside, 1-octadecyl beta-D-melibioside, 1-hexadecylbeta-D-melibioside, I-tetradecylbeta-D-melibioside, 1-dodecyl beta-D-melibioside, 1-decyl beta-D-melibioside, or 1-octyl beta-D-melibioside, as well as the corresponding 6′ or 6′,6 carboxylic acids. In some embodiments, the surfactant X is 1-tetradecyl beta-D-maltoside, 1-eicosyl beta-D-melibioside, 1-octadecyl beta-D-melibioside, I-hexadecyl beta-D-melibioside, 1-tetradecyl beta-D-melibioside, 1-dodecyl beta-D-melibioside, 1-decyl beta-D-melibioside, or 1-octyl beta-D-melibioside.

[0101] In some embodiments of the peptide product, U is a terminal amino acid of the peptide. In some embodiments of the peptide product, U is a non-terminal amino acid of the peptide. In some embodiments of the peptide product, U is a natural D-or L- amino acid. In some embodiments of the peptide product, U is an unnatural amino acid. In some embodiments of the peptide product, U is selected from Lys, Cys, Orn, or an unnatural amino acid comprising a functional group used for covalent attachment to the surfactant X.

[0102] In some embodiments of the peptide product, the functional group used for covalent attachment of the peptide to the surfactant X is —NH₂, —SH, —OH, —N₃, haloacetyl, a —(CH₂)ₘ-maleimide (wherein m is 1-10), or an acetylenic group.

[0103] In some embodiments side chain functional groups of two different amino acid residues are linked to form a cyclic lactam. This linkage is denoted with an asterisk on the two residues so linked. For example, in some embodiments, a Lys* side chain forms a cyclic lactam with the side chain of Glu* In some embodiments such lactam structures are reversed and are formed from a Glu* and a Lys*. Such lactam linkages in some instances are known to stabilize alpha helical structures in peptides (Condon, S. M., et al. (2002) Bioorg Med Chern 10: 731-736; Murage, E. N., et al (2008) Bioorg Med Chem 16: 10106-12); Murage, E. N., et al. (2010) J Med Chem 53: 6412-20). In some embodiments c-ysteine residues may be linked through disulfide formation in order to accomplish a similar form of conformational restriction and assist in the formation of helical structures (Li, Y., et at (2011) Peptides 32: 1400-1407). In some embodiments side chain functional groups of two different amino acid residues are linked to form a heterocycle generated through a “click reaction” between side chain azide and alkyne functional groups in order to achieve a similar form of conformational restriction and stabilized helical conformations (Le Chevalier Isaad A., et al. (2009) J Peptide Sci 15: 451-4). In some embodiments side chain functional groups of two different amino acid residues are linked to form a C-CT double bond through the use of an olefin metathesis reaction and may be further modified by reduction to a C-C single bond (Verdine, G. L. and Hilinski, G. J. (2011) Meth Enzymol 503: 3-33).

[0104] In some embodiments, the peptide product comprising a covalently linked alkyl glycoside is a covalently modified glucagon or analog thereof. In some of such embodiments, the peptide product contains a covalently linked 1-O-alkyl P-D-glucuronic acid and the peptide is an analog of glucagon.

[0105] In some embodiments, a peptide product comprising a covalently linked alkyl glycoside is a covalently modified GLP-1, or analog thereof. In some of such embodiments, the peptide product comprises a covalently linked 1-O-alkyl β-D-glucuronic acid and the peptide is an analog of GLP-1.

[0106] In some embodiments, the peptide product of Formula I-A has the structure of Formula III-A

aa₁-aa₂-aa₃-aa₄-aa₅-aa₆-aa₇-aa₈-aa₉aa₁₀-aa₁₁-aa₁₂-aa₁₃-aa₁₄-aa₁₅-aa₁₆-aa₁₇-aa₁₈-aa₁₉-aa₂₀-aa₂₁-aa₂₂-aa₂₃-aa₂₄-aa₂₅-aa₂₆-aa₂₇-aa₂₈-aa₂₉- Formula III (SEQ. ID. NO. 1109)
[0107] wherein:
[0108] Z is OH, or —NH—R³, wherein R³ is H, or C₁-C₁₂ substituted or unsubstituted alkyl, or a PEG chain of less than 10 Da;
[0109] aa₁ is His, N—Ac-His, pGlu-His, or N—R³-His;
[0110] aa₂ is Ser, Ala, Gly, MePro, Aib, Ac4c, or Ac5c;
[0111] aa₃ is Gln, or Cit;
[0112] aa₁ is Gly, or D-Ala;
[0113] aa₅ is Thr, or Ser;
[0114] aa₆ is Phe, Trp, 2FPhe, MePhe, 2FMePhe, or Nal2;
[0115] aa₇ is Thr, or Ser;
[0116] aa₈ is Ser, or Asp;
[0117] aa₉ is Asp, or Glu;
[0118] aa₁₀ is Tyr, Len, Met, Nal2, Bip, Bip2EtMeO, Glu, Lys or U(X);
[0119] aa₁₁ is absent or Ser, Asn, Bip or U(X);
[0120] aa₁₂ is absent or Lys, Glu, Ser, Arg, or U(X);
[0121] aa₁₃ is absent or Tyr, Gln, Cit, or U(X);
[0122] aa₁₄ is absent or Len, Met, Nle, Glu, Lys or U(X);
[0123] aa₁₅ is absent or Asp, Glu, or U(X);
[0124] aa₁₆ is absent or Ser, Gly, Glu, Ala, Aib, Ac5c, Lys, Arg, or U(X);
[0125] aa₁₇ is absent or Arg, hArg, Gln, Glu, Lys, Cit, Aib, Ac4c, Ac5c, or U(X);
[0126] aa₁₈ is absent or Arg, hArg, Ala, Aib, Ac4c, Ac5c, or U1(X);
[0127] aa₁₉ is absent or Ala, Val, Aib, Ac4c, Ac5c, or U(X);
[0128] aa₂₀ is absent or Gln, Lys, Arg, Cit, Glu, Aib, Ac4c, Ac5c, or UT(X);
[0129] aa₂₁ is absent or Asp, Gln, Leu, Aib, Ac4c, Ac5c, or U(X);
[0130] aa₂₂ is absent or Phe, Trp, Nal2, Aib, Ac4c, Ac5c, or U(X);
[0131] aa₂₃ is absent or Val, lie, Aib, Ac4c, Ac5c, or U(X);
[0132] aa₂₄ is absent or Ala, Gln, Gln, Cit, or U(X);
[0133] aa₂₅ is absent or Trp, Nal2, or U(X);
[0134] aa₂₆ is absent or Len, or U(X);
[0135] aa₂₇ is absent or Met, Val, Leu, Nle, Lys, or U(X);
[0136] aa₂₈ is absent or Asn, Lys, Glu, Gln, or U(X);
[0137] aa₂₉ is absent or Thr, Gly, Aib, Ac4c, Ac5c, or U(X);
[0138] wherein any two of aa₁-aa₂₉ are optionally cyclized through their side chains to form a lactam linkage; and
[0139] provided that one, or at least one of aa₁₀, aa₁₁, aa₁₂, aa₁₆, aa₁₇, aa₁₈, aa₁₉, aa₂₀, aa₂₁, aa₂₂, aa₂₃ aa₂₄, aa₂₅, aa₂₆, aa₂₇, aa₂₈ or aa₂₉ is the natural or unnatural amino acid U covalently attached to X.

[0140] In some embodiments, the peptide product of Formula I-A has the structure of Formula III-A

aa₁-aa₂-aa₃-aa₄-aa₅-aa₆-aa₇-aa₈-aa₉-aa₁₀-aa₁₁-aa₁₂-aa₁₃-aa₁₄-aa₁₅-aa₁₆-aa₁₇-aa₁₈-aa₁₉-aa₂₀-aa₂₁-aa₂₂-aa₂₃-aa₂₄-aa₂₅-aa₂₆-aa₂₇-aa₂₈-aa₂₉-Z Formula III-A (SEQ. ID. NO. 1110)
[0141] wherein:
[0142] Z is OH, or —NH—R³, wherein R³ is H, or C₁-C₁₂ substituted or unsubstituted alkyl, or a PEG chain of less than 10 Da;
[0143] aa₁ is His;
[0144] aa₂ is Aib:
[0145] aa₃ is Gln;
[0146] aa₄ is Gly;
[0147] aa₅ is Thr;
[0148] aa₆ is Phe;
[0149] aa₇ is Thr;
[0150] aa₈ is Ser;
[0151] aa₉ is Asp;
[0152] aa₁₀ is Tyr, Glu, Lys, or U(X);
[0153] aa₁₁ is Ser:
[0154] aa₁₂ is Lys, Gln;
[0155] aa₁₃ is Tyr;
[0156] aa₁₄ is Leu, Glu, Lys;
[0157] aa₁₅ is Asp;
[0158] aa₁₆ is Glu, Lys;
[0159] aa₁₇ is Gln, Glu, or U(X);
[0160] aa₁₈ is Ala;
[0161] aa₁₉ is Ala;
[0162] aa₂₀ is Glu, Lys or U(X);
[0163] aa₂₁ is Glu;
[0164] aa₂₂ Phe;
[0165] aa₇₃ is Ile:
[0166] aa₂₄ is Gln, Glu, or U(X);
[0167] aa₂₁ is Trp;
[0168] aa₂₆ is Len:
[0169] aa₂₇ is Leu;
[0170] aa₂₈ is Glu or Gln;
[0171] aa₂₉ is Thr;
[0172] wherein aa₁₆ and aa₂₆, or aa₁₀ and aa₁₁, or aa₁₂ and aa₁₃ are optionally cyclized through their side chains to form a lactam linkage; and
[0173] provided that one, or at least one of aa₁₀, aa₁₇, aa₂₀, or aa₂₄ is the natural or unnatural amino acid U covalently attached to X.

[0174] In some embodiments, the peptide product of Formula I-A has the structure of Formula III-B:

aa₁-aa₂-aa₃-aa₄-aa₅-aa₆-aa₇-aa₈-aa₉-aa₁₀-aa₁₁-aa₁₂-aa₁₃-aa₁₄-aa₁₅-aa₁₆-aa₁₇-aa₁₈-aa₁₉-aa₂₀-aa₂₁-aa₂₂-aa₂₃-aa₂₄-aa₂₅-aa₂₆-aa₂₇-aa₂₈-aa₂₉-aa₃₀-Z Formula II (SEQ. ID. NO. 1108)
[0175] wherein:
   [0176] Z is OH, or —NH—R³,
      [0177] wherein R³ is H, substituted or unsubstituted C₁-C₁₂ alkyl, or a PEG chain of less than 10 Da;
      [0178] aa₂ is Gly, MePro or Aib;
      [0179] aa₃ is Gln or Cit;
      [0180] aa₆ is Phe, 2FPhe, MePhe, 2FMePhe, or Nal2;
      [0181] aa₁₀ is Tyr, Nal2, Bip, Bip2EtMeO, Glu, Lys or U(X);
      [0182] aa₁₁ is absent or Ser, Asn, Bip or U(X);
      [0183] aa₁₂ is absent or Lys, Glu, Ser or U(X);
      [0184] aa₁₃ is absent or Tyr, Gln, Cit, or U(X);
      [0185] aa₁₄ is absent or Leu, Nle, Glu, Lys or U(X);
      [0186] aa₁₅ is absent or Asp, Glu, or U(X);
      [0187] aa₁₆ is absent or Ser, Gly, Glu, Ala, Aib, Lys, Arg, or U(X);
      [0188] aa₁₇ is absent or Arg, hArg, Gln, Glu, Lys, Cit, Aib, or U(X;
      [0189] aa₁₈ is absent or Arg, hArg, Ala, Aib, Ac4c, Ac5c, or U(X);
      [0190] aa₁₉ is absent or Ala, Aib, or U(X);
      [0191] aa₂₀ is absent or Gln, Lys, Arg, Cit, Glu, Aib, or U(X);
      [0192] aa₂₁ is absent or Asp, Glu, Leu, Aib, or U(X);
      [0193] aa₂₂ is absent or Phe, or U(X)
      [0194] aa₂₃ is absent or Val, Ile, Aib or U(X);
      [0195] aa₂₄ is absent or Ala, Glu, Gln or U(X);
      [0196] aa₂₅ is absent or Trp or U(X);
      [0197] aa₂₆ is absent or Leu or U(X);
      [0198] aa₂₇ is absent or Met, Val, Leu, Nle, Lys or U(X);
      [0199] aa₂₈ is absent or Asn, Glu, Gln, Cit, or U(X);
      [0200] aa₂₉ is absent or Tbr, Aib, or U^{T}(X);
      [0201] aa₃₀ is absent or Arg, or U(X);
   [0202] wherein any two of aa₁-aa₂₃ are optionally cyclized through their side chains to form a lactam linkage; and
[0203] provided that one, or at least one of aa₁₀, aa₁₁, aa₁₂, aa₁₆, aa₁₇, aa₁₈, aa₁₉, aa₂₀, aa₂₁, aa₂₂, aa₂₃, aa₂₄, or aa₂₅ is the natural or unnatural amino acid U covalently attached to X.

[0204] In some embodiments of Formula I-A, III-A, or III-B, U is any linker amino acid described herein.

[0205] In some embodiments of Formula I-A, III-A, or III-B, aa₁₂ is lysine. In some embodiments of Formula I-A, III-A, or III-B, aa₁₄ is leucine.

[0206] In some embodiments of Formula I-A, III-A, or III-B, aa₁₈ is a lysine residue attached to X.

[0207] In some embodiments of Formula I-A, III-A, or III-B, aa₁₇ is a homo Arginine (hArg) residue.

[0208] In some embodiments of Formula I-A, III-A, or III-B, aa₁₇ is a glycine residue.

[0209] In some embodiments of Formula I-A, III-A, or III-B, aa₂ is an Aib or Ac4c residue. In some embodiments, aa₂ is an Aib residue.

[0210] In some embodiments of Formula I-A, III-A, or III-B, the peptide comprises one or more Aib residues.

[0211] In some embodiments of Formula I-A, III-A, or III-B, peptide comprises one or more Aib residues at the C-terminus.

[0212] In some embodiments of Formula I-A, III-A, or III-B, peptide comprises amino acid spacers between the saccharide of the surfactant and the linker amino acid in the peptide.

[0213] In some embodiments of Formula I-A, III-A, or III-B, the peptide product has the structure:

His₁-aa₂-Gln₃-Gly₄-Thr₅-Phe₆-Thr₇-Ser₈-Asp₉-Tyr₁₀-Ser₈-Lys₁₂-Tyr₁₃-Leu₁₄-Asp₁₅-aa₁₆-aa₁₇-Ala₁₈-Ala₁₉-aa₂₀-Glu₂₁-Phe₂₂-aa₂₃-aa₂₄-Trp₂₅-Leu₂₆-aa₂₇-aa₂₈-Thr₂₉-NH₂; (SEQ. ID. NO. 774) wherein
[0214] aa₂ is Gly or Aib;
[0215] aa₁₆ is Glu, Ser, Ala, Lys, or Aib;
[0216] aa₁₇ is Gln, Glu, Lys or U(X);
[0217] aa₂₀ is Lys, Glu or Arg;
[0218] aa₂₃ is Ile or Val;
[0219] aa₂₄ is Ala, Gln, or U(X);
[0220] aa₂₇ is Met, Val or Leu;
[0221] aa₂₈ is Asn, Gln or U(X).

[0222] In some embodiments of Formula I-A, III-A, or III-B, the peptide product has the structure:

His₁-aa₂-Gln₃-Gly₄-Thr₅-Phe₆-Thr₇-Ser₈-Asp₉-Tyr₁₀-Ser₈-Lys₁₂-Tyr₁₃-Leu₁₄-Asp₁₅-aa₁₆-aa₁₇-Ala₁₈-Aa₁₉-Lys₂₀-Glu₂₁-Phe₂₂-Ile₂₃-Gln₂₄-Trp₂₅-Leu₂₆-Leu₂₇-Asn₂₈-Thr₂₉-NH₂; (SEQ. ID. NO. 775) wherein
[0223] aa₂ is Gly or Aib;
[0224] aa₁₆ is Glu, Ala, Aib;
[0225] aa₁₇ is Lys or U(X):
[0226] aa₂₇ is Leu or Val.

[0227] In some embodiments of Formula I-A, III-A, or III-B, the peptide product has the structure:

His₁-aa₂-Gln₃-Gly₄-Thr₅-Phe₆-Thr₇-Ser₈-Asp₉-Tyr₁₀-Ser₈-Lys₁₂-Tyr₁₃-Leu₁₄-Asp₁₅-aa₁₆-aa₁₇-Ala₁₈-Ala₁₉-aa₂₀-Glu₂₁-Phe₂₂-aa₂₃-aa₂₄-Trp₂₅-Leu₂₆-aa₂₇-aa₂₈-Thr₂₉-NH₂; (SEQ. ID. NO. 776) wherein
[0228] aa₂ is Gly or Aib;
[0229] aa₁₆ is Glu, Ser, Ala, or Aib;
[0230] aa₁₇ is Arg, hArg, or Gln,
[0231] aa₂₀ is Lys or U(X);
[0232] aa₂₃ is Ile or Val;
[0233] aa₂₄ is Ala, Gln, or U3(X);
[0234] aa₂₇ is Leu or Val; and
[0235] aa₂₈ is Asn, Gln, or U(X).

[0236] In some embodiments of Formula I-A, III-A, or III-B, the peptide product has the structure:

His₁-aa₂-Gln₃-Gly₄-Thr₅-Phe₆-Thr₇-Ser₈-Asp₉-Tyr₁₀-Ser₈-Lys₁₂-Tyr₁₃-Leu₁₄-Asp₁₅-aa₁₆-aa₁₇-Ala₁₈-Ala₁₉-aa₂₀-Glu₂₁-Phe₂₂-aa₂₃-aa₂₄-Trp₂₅-Leu₂₆-aa₂₇-aa₂₈-Thr₂₉-NH₂; SEQ. ID. NO. 777) wherein
[0237] aa₂ is Gly or Aib;
[0238] aa₁₆ is Glu, Ser, Ala, Aib;
[0239] aa₁₈ is Arg, hArg or Gln,
[0240] aa₂₀ is Lys or U(X);
[0241] aa₂₃ is Ile or Val;
[0242] aa₂₄ is Gln, Ala or U(X);
[0243] aa₂₇ is Leu or Val;
[0244] aa₂₈ is Asn, Gln or U(X).

[0245] In some embodiments of Formula I-A, III-A, or III-B, the peptide product has the structure:

His₁-aa₂-Gln₃-Gly₄-Thr₅-Phe₆-Thr₇-Ser₈-Asp₉-Tyr₁₀-Ser₈-Lys₁₂-Tyr₁₃-Leu₁₄-Asp₁₅-aa₁₆-aa₁₇-Ala₁₈-Ala₁₉-aa₂₀-Glu₂₁-Phe₂₂-Ile₂₃-Lys(N-omega-X)₂₄-Trp₂₅-Leu₂₆-aa₂₇-aa₂₈-Thr₂₉-NH₂; (SEQ. ID. NO. 778) wherein
[0246] aa₂ is Aib or Gly;
[0247] aa₁₆ and aa₂₀ are each individually either Lys or Glu and are cyclized through their side chains to form a lactam linkage;
[0248] aa₁₇ is Arg, hArg or Gln;
[0249] aa₂₇ is Met, Val, Len or Nle;
[0250] aa₂₈ is Asn or Gln; and
[0251] alkyl is a C₈-C₂₀ linear alkyl chain.
   In some embodiments, Lys(N-omega-X)₂₄ is Lys(N-omega-1′-alkyl beta-D-glucuronyl).

[0252] In some embodiments of Formula I-A, III-A, or III-B, the peptide product has the structure:

His₁-aa₂-Gln₃-Gly₄-Thr₅-Phe₆-Thr₇-Ser₈-Asp₉-Tyr₁₀-Ser₁₁-Lys₁₂-Tyr₁₃-Leu₁₄-Asp₁₅-aa₁₆-aa₁₇-Ala₁₈-Ala₁₉-Lys₂₀-Glu₂₁-Phe₂-Ile₂₃-Ala₂₄-TrP₂₅-Leu₂₆-Leu₂₇-Asn₂₈-Thr₂₉-NH₂; (SEQ. ID. NO. 779) wherein
[0253] aa₂ is Aib or Gly;
[0254] aa₁₆ is Glu, Ala or Aib;
[0255] aa₁₇ is Lys or Lys(N-omega-X);
[0256] and alkyl is a C₈-C₂₄ linear alkyl chain.
   In some embodiments, aa₁₇ is Lys(N-omega-1′-alkyl beta-D-glucuronyl).

[0257] In some embodiments of Formula I-A, III-A, or III-B, the peptide product has the structure:

His₁-aa₂-Gln₃-Gly₄-Thr₅-Phe₆-Thr₇-Ser₈-Asp₉-Tyr₁₀-Ser₁₁-Lys₁₂-Tyr₁₃-Leu₁₄-Asp₁₅-aa₁₆-aa₁₇-Arg₁₈-Ala₁₉-aa₂₀-Asp₂₁-Phe₂₂-aa₂₃-aa₂₄-Trp₂₅-Leu₂₆-aa₂₆-aa₂₅-Thr₂₆-NH₂; (SEQ. ID. NO. 780) wherein
[0258] aa₂ is Gly or Aib:
[0259] aa₁₆ is Glu, Ala, Aib;
[0260] aa₁₇ is Arg, hArg;
[0261] aa₂₀ is Lys or Lys(N-omega-X);
[0262] aa₂₃ is Ile or Val:
[0263] aa₂₄ is Gln or Ala;
[0264] aa₂₇ is Leu or Val;
[0265] aa₂₈ is Asn or Gln;
[0266] and alkyl is a C₈-C₂₀ linear alkyl chain.
   In some embodiments, aa₂₀ is Lys(N-omega-1′-alkyl beta-D-glucuronyl).

[0267] In some embodiments of Formula I-A, III-A, or III-E, the peptide product has the structure:

His₁-aa₂-Gln₃-Gly₄-Thr₅-aa₆-Thr₇-Ser₈-Asp₉-aa₁₀-aa₁₁-Z; (SEQ.ID.NO.781) wherein
[0268] aa₂ is Gly, Aib or MePro;
[0269] aa₆ is Phe, 2FPhe, MePhe or 2FMePhe;
[0270] aa₁₀ is Tyr, Nal2, Bip, Bip2Et or Bip2EtMeO;
[0271] aa₁₁ is Lys or Lys(N-omega-X);
[0272] and alkyl is a C₈-C₂₀ linear alkyl chain.
   In some embodiments, aa₂₁ is Lys(N-omega-1′-alkyl beta-D-glucuronyl).

[0273] In some embodiments of Formula I-A, III-A, or III-B, the peptide product has the structure:

His₁-Aib₂-Gln₃-Gly₄-Thr₅-Phe₆-Thr₇-Ser₈-Asp₉-U(X)₁₀-Ser₁₁-Lys₁₂-Tyr₁₃-Leu₁₄-Asp₁₅-aa₁₆-aa₁₇-Ala₁₈-Ala₁₉-aa₂-Glu₂-Phe₂₂-Ile₂₃-aa₂₄-Trp₂₅-Leur₂₆-Leu₂₇-aa₂₅-Thr₂₉-Z; (SEQ. ID. NO. 1025)
[0274] wherein:
   [0275] Z is OH, or —NH—R³,
   [0276] wherein R³ is H, or comprises a PEG chain of less than 10 Da;
   [0277] aa₁₆ and aa₂₀ are each individually either Lys or Glu and are cyclized through their side chains to form a lactam linkage;
   [0278] aa₁₇ Glu or Gln;
   [0279] aa₂₄ is Ala, Glu or Gln;
   [0280] aa₂₈ is Asn or Gln.

[0281] In some embodiments of Formula I-A, III-A, or III-B, the peptide product has the structure:

His₁-aa₂-Gln₃-Gly₄-Thr₅-Phe₆-Thr₇-Ser₈-Asp₉-Tyr₁₀-Ser₁₁-Lys₁₂-Tyr₁₃-Leu₁₄-Asp₁₅-Glu₁₆-U(X)₁₇-Ala₁₈-Ala₁₉-Lys₂₀-Glu₂₁-Phe₂₂-Ile₂₃-GLn₂₄-Trp₂₅-Leu₂₆-Leu₂₇-aa₂₈-Thr₂₉-NH₂; (SEQ. ID. NO. 795)
[0282] wherein
[0283] aa₂ is Gly or Aib;
[0284] aa₂₈ is Asn or Gln.

[0285] In some embodiments of Formula I-A, III-A, or III-B, the peptide product has the structure:

His₁-Aib₂-Gln₃-Gly₄-Thr₅-Phe₆-Thr₇-Ser₈-Asp₉-Tyr₁₀-Ser₁₁-Lys₁₂-Tyr₁₃-Leu₁₄-Asp₁₅-aa₁₆-U(X)₁₇-Ala₁₈-Ala₁₉-aa₂₀-Glu₂₁-Phe₂₂-Ile₂₃-aa₂₄-Trp₂₅-Leu₂₆-Leu₂₇-aa₂₈-Thr₂₉-Z; (SEQ. ID. NO. 1026)
[0286] wherein:
   [0287] Z is OH, or —NH—R³,
   [0288] wherein R³ is H, or comprises a PEG chain of less than 10 Da;
   [0289] aa₁₆ and aa₂₀ are each individually either Lys or Glu and are cyclized through their side chains to form a lactam linkage;
   [0290] aa₂₄ is Ala, Glu or Gln;
   [0291] aa₂₈ is Asn or Gln.

[0292] In some embodiments of Formula I-A, II-A, or III-B, the peptide product has the structure:

His₁-Aib₂-Gln₃-Gly₄-Thr₅-Phe₆-Thr₇-Ser₈-Asp₉-aa₁₀-Ser₁₁-Lys₁₂-Tyr₁₃-aa₁₄-Asp₁₅-Ser₁₆-aa₁₇-Ala₁₈-Ala₁₉-U(X)₂₀-Glu₂₁-Phe₂₂-Ile₂₃-aa₂₄-Trp₂₅-Leu₂₆-Leu₂₇-aa₂₈-Thr₂₉-Z; (SEQ. ID. NO. 1027)
[0293] wherein:
   [0294] Z is OH, or —NH—R³,
   [0295] wherein R³ is H, or comprises a PEG chain of less than 10 Da;
   [0296] aa₁₀ and aa₁₄ are each individually either Lys or Glu and are cyclized through their side chains to form a lactam linkage;
   [0297] aa₁₇ is Glu or Gln;
   [0298] aa₂₄ is Ala, Glu or Gln;
   [0299] aa₂₅ is Asn or Gln.

[0300] In some embodiments of Formula I-A, III-A, or III-B, the peptide product has the structure:

His₁-Aib₂-Glun₃-Gly₄-Thr₅-Phe₆-Thr₇-Ser₈-Asp₉-Tyr₁₀-Ser₁₁-aa₁₂-Tyr₁₃-Gln₁₄-Asp₁₅-aa₁₆-aa₁₇-Ala₁₈-Ala₁₉-U(X)₂-Glu₂₁-Phe₂₂-Ile₂₃-aa₂₄-Trp₂₅-Leu₂₆-Leu₂₇-aa₂₈-Thr₂₉-Z; (SEQ. ID. NO. 1028)
[0301] wherein:
   [0302] Z is OH, or —NH—R³,
   [0303] wherein R³ is H, or comprises a PEG chain of less than 10 Da;
   [0304] aa₁₂ and aa₁₆ are each individually either Lys or Glu and are cyclized through their side chains to form a lactam linkage;
   [0305] aa₁₇, is Glu or Gln;
   [0306] aa₂₄ is Ala, Glu or Gln;
   [0307] aa₂₅ is Asn or Gln.

[0308] In some embodiments of Formula I-A, III-A, or III-B, the peptide product has the structure:

His₁-Aib₂-Gln₃-Gly₄-Thr₅-IPhe₆-Thr₇-Ser₈-Asp₉-Tyr₁₀-Ser₁₁-Lys₁₂-Tyr₁₃-Leu₁₄-Asp₁₅-aa₁₆-Gln₁₇-Ala₁₈-Ala₁₉-aa₂₀-Glu₂₁-Phe₂₂-Ile₂₃-U(X)₂₄-Trp₂₅-Leu₂₆-Leu₂₇-aa₂₈-Thr₂₉-Z; (SEQ. ID. NO. 1029)
[0309] wherein
[0310] Z is OH, or —NH—R³,
[0311] wherein R³ is H, or a PEG chain of less than 10 Da;
[0312] aa₁₆ and aa₂₀ are each individually either Lys or Glu and are cyclized through their side chains to form a lactam linkage;
[0313] and aa₂₈ is Asn or Gln;
[0314] X comprises a glucuronyl class moiety prepared from 1-alkyl beta-D-glucosides, 1-alkyl beta-D-maltosides, 1-alkyl beta-D-melibiosides, or the corresponding alpha glycosdes, and the like, and where alkyl is a C₈-C₂₀ linear alkyl chain.

[0315] In some embodiments of Formula I-A, III-A, or III-B, the peptide product has the structure:

His₁-Aib₂-Gln₃-Gly₄-Thr₅-Phe₆-Thr₇-Ser₈-Asp₉-Tyr₁₀-Ser₁₁-Lys₁₂-Tyr₁₃-Leu₁₄-Asp₁₅-Glu*₁₆-Gln₁₇-Ala₁₈-Ala₁₉-Lys*₂₀-Glu₂₁-Phe₂₂-Ile₂₃-Lys(N-omega-X)₂₄-Trp₂₅-Leu₂₆-Leu₂₇-Gln₂₈-Thr₂₉-Z; (SEQ. ID. NO. 1113)
[0316] wherein
[0317] Z is OH, or —NH—R³,
[0318] aa₁₆ and aa₂₀ are cyclized through their side chains to form a lactam linkage;
[0319] and X comprises a glucuronyl class moiety prepared from 1-alkyl beta-D-glucosides, 1-alkyl beta-D-maltosides, 1-alkyl beta-D-melibiosides, or the corresponding alpha glycosides, and the like, and where alkyl is a C₈-C₂₀ linear alkyl chain.

[0320] In some embodiments of Formula I-A, II-A, or III-B, the peptide product has the structure:

His₁-Aib₂-Gln₃-Gly₄-Thr₅-Phe₆-Thr₇-Ser₈-Asp₉-Tyr₁₀-Ser₁₁-Lys₁₂-Tyr₁₃-Leu₁₄-Asp₁₅-Glu*₁₆-Gln₁₇-Ala₁₈-Ala₁₉-Lys*₂₀-Glu₂₁-Phe₂₂-Ile₂-Lys(N-omega(1-dodecyl beta-D-glucuronyl))₂₄-Trp₂₅-Leu₂₆-Leu₂₇-Gln₂₈-Thr₂₉-NH₂; (SEQ. ID. NO. 601)
[0321] wherein
[0322] Glu*₁₆ and Lys*₂₀ are cyclized through their side chains to form a lactam linkage.

[0323] In some embodiments of Formula I-A, III-A, or III-B, the peptide product has the structure:

His₁-Aib₂-Gln₃-Gly₄-Thr₅-Phe₆-Thr₇-Ser₈-Asp₉-Tyr₁₃-Ser₁₁-Lys₁₂-Tyr₁₀-Leu₁₄-Asp₁₅-Glu*₁₆-Gln₁₇-Ala₁₈-Ala₁₉-Lys*₂₀-Glu₂₁-Phe₂₂-Ile₂-Lys(N-omega(1-tetradecyl beta-D-glucuronyl))₂₄-Trp₂₅-Leu₂₆-Leu₂₇-Gln₂₈-Thr₂₉-NH₂; (SEQ. ID. NO. 602)
[0324] wherein
[0325] Glu*₁₆ and Lys*₂₀ are cyclized through their side chains to form a lactam linkage.

[0326] In some embodiments of Formula I-A, III-A, or III-B, the peptide product has the structure:

His₁-Aib₂-Gln₃-Gly₄-Thr₅-Phe₆-Thr₇-Ser₈-Asp₉-Tyr₁₀-Ser₁₁-Lys₁₂-Tyr₁₃-Leu₁₄-Asp₁₅-Glu*₁₆-Gln₁₇-Ala₁₈-Ala₁₉-Lys*₂₀-Glu₂₁-Phe₂₂-Ile₂₃-Lys(N-omega(1-hexadecyl beta-D-glucuronyl))₂₄-Trp₂₅-Leu₂₆-Leu₂₇-Gln₂₈-Thr₂₉-NH₂; (SEQ. ID. NO. 603)
[0327] wherein
[0328] Glut₁₆ and Lys*₂₀ are cyclized through their side chains to form a lactam linkage.

[0329] In some embodiments of Formula I-A, III-A, or III-B, the peptide product has the structure:

His₁-Aib₂-Gln₃-Gly₄-Thr₅-Phe₆-Thr₇-Ser₈-Asp₉-Tyr₁₀-Ser₁₁-Lys₁₂-Tyr₁₃-Leu₁₄-Asp₁₅-Glu*₁₆-Gln₁₇-Ala₁₈-Ala₁₉-Lys*₂₀-Glu₂₁-Phe₂₂-Ile₂₃-Lys(N-omega(1-octadecyl beta-D-glucuronyl))₂₄-Trp₂₅-Leu₂₆-Leu₂₇-Gln₂₈-Thr₂₉-NH₂; (SEQ. TD. NO. 604).
[0330] wherein
[0331] Glut₁₆ and Lys*₂₀ are cyclized through their side chains to form a lactam linkage.

[0332] In some embodiments, the peptide product has the structure:

His₁-Aib₂-Gln₃-Gly₄-Thr₅-Phe₆-Thr₇-Ser₈-Asp₉-Tyr₁₀-Ser₁₁-Lys₁₂-Tyr₁₃-Leu₁₄-Asp₁₅-Glu*₁₆-Gln₁₇ Ala₁₈-Ala₁₉-Lys*₂₀-Glu₂-Phe₂₂-Ile₂₃-Lys(N-omega(1-octyl beta-D-melibiouronyl))₂₄-Trp₂₅-Leu₂₆-Leu27-Gln₂₈-Thr₂₉-NH₂; (SEQ. ID. NO. 630)

His₁-Aib₂-Gln₃-Gly₄-Thr₅-Phe₆-Thr₇-Ser₈-Asp₉-Tyr₁₀-Ser₁₁-Lys₁₂-Tyr₁₃-Leu₁₄-Asp₁₅-Glu* ₆-Gln₁₇ Ala₁₈-Ala₁₉-Lys*₂₀Glu₂₁-Phe₂₂-Ile₂₃-Lys(N-omega(1-dodecyl beta-D-melibiouronyl)₂₄-Trp₂₅-Leu₂₆-Leu₂₇-Gln₂₈-Thr₂₉-NH₂; (SEQ. ID. NO. 631)

His₁-Aib₂-Gln₃-Gly₄-Thr₅-Phe₆-Thr₇-Ser₈-Asp₉-Tyr₁₀-Ser₁₁-Lys₁₂-Tyr₁₃-Leu₁₄-Asp₁₅-Glu*₁₆-Gln₁₇Ala₁₈-Ala₁₉-Lys*₂₀-Glu₂₁-Phe₂₂-Ile₂₃-Lys(N-omega(1-tetradecyl beta-D-melibiouronyl))₂₄-Trp₂₅-Leu₂₆-Leu₂₇-Gln₂₈-Thr₂₉-NH₂; (SEQ. ID. NO. 632)

His₁-Aib₂-Gln₃-Gly₄-Thr₅-Phe₆-Thr₇-Ser₈-Asp₉-Tyr₁₀-Ser₁₁-Lys₁₂-Tyr₁₃-Leu₁₄-Asp₁₅-Glu*₁₆-Gln₁₇ Ala₁₈-Ala₁₉-Lys*₂₀-Glu₂₁-Phe₂₂-Ile₂₃-Lys(N-omega(1-hexadecylbeta-D-melibiouronyl))₂₄-Trp₂₅-Leu₂₆-Leu₂₇-Gln₂₈-Thr₂₉-NH₂; (SEQ. ID. NO. 633)

His₁-Aib₂-Gln₃-Gly₄-Thr₅-Phe₆-Thr₇-Ser₈-Asp₉-Tyr₁₀-Ser₁₁-Lys₁₂-Tyr₁₃-Leu₁₄-Asp₁₅-Glu₁₆-Gln₁₇ Ala₁₈-Ala₁₉-Lys*₂₀-Glu₂₁-Phe₂₂-Ile₂₃-Lys(N-omega(1-octadecyl beta-D-melibiouronyil))₂₄-Trp₂₅-Leu₂₆-Leu₂₇-Gln₂₈-Thr₂₉-NH₂; (SEQ. ID. NO. 634)

His₁-Aib₂-Gln₃-Gly₄-Thr₅-Phe₆-Thr₇-Ser₈-Asp₉-Tyr₁₀-Ser₁₁-Lys₁₂-Tyr₁₃-Leu₁₄-Asp₁₅-Glu₁₆-Gln₁₇ Ala₁₈-Ala₁₉-Lys*₂₀-Glu₂₁-Phe₂₂-Ile₂₃-Lys(N-omega(1-hexadecyl alpha-D-melibiouronyl))₂₄-Trp₂₅-Leu₂₆-Leu₂₇-Gln₂₈-Thr₂₉-NH₂; (SEQ. ID. NO. 805)

His₁-Aib₂-Gln₃-Gly₄-Thr₅-Phe₆-Thr₇-Ser₈-Asp₉-Tyr₁₀-Ser₁₁-Lys₁₂-Tyr₁₃-Leu₁₄-Asp₁₅-Glu₁₆-Lys(N-oncga(1-tetradecyl alpha-D-melibiouronyl))₁₇ Ala₁₈-Ala₁₉-Lys*₂₀-Glu₂₁-Phe₂₂-Ile₂₃-Gln₂₄-Trp₂₅-Leu₂₆-Leu₂₇-Gn₂₈-Thr₂₉-NH₂: (SEQ. ID. NO. 819)

His₁-Aib₂-Gln₃-Gly₄-Thr₅-Phe₆-Thr₇-Ser₈-Asp₉-Tyr₁₀-Ser₁₁-Lys₁₂-Tyr₁₃-Leu₁₄-Asp₁₅-Glu*₁₆-Lys(N-orega(1-hexadecyl alpha-D-melibiouronyl))₁₇-Ala₁₈-Ala₁₉-Lys*₂₀-Gu₂₁-Phe₂₂-Ile₂₃-Gln₂₄-Trp₂₅-Leu₂ₕ-Leu₂₇-Gln₂₈-Thr₂₉-NH₂; (SEQ. ID. NO. 820)

His₁-Aib₂-Gln₃-Gly₄-Thr₅-Phe₆-Thr₇-Ser₈-Asp₉-Tyr₁₀-Ser₁₁-Lys₁₂-Tyr₁₃-Leu₁₄-Asp₁₅-Glu*₁₆Lys(N-omega(1-octadecyl alpha-D-melibiouronyl))₁₇Ala-Ala-Lys*_{2f}-Glu₂₁-Phe₂₂-Ile₂₃-Gln₂₄-Trp₂₅-Leu₂a-Leu₂₁-Gln₂₈-Thr₂₉-NH₂; (SEQ. ID. NO. 821)

His₁-Aib₂-Gln₃-Gly₄-Thr₅-Phe₆-Thr₇-Ser₈-Asp₉-Tyr₁₀-Ser₁₁-Lys₁₂-Tyr₁₃-Leu₁₄-Asp₁₅-Glu*₁₆-Lys(N-omega(1-dodecyl alpha-D-melibiouronyl))₁₇Ala₁₈-Ala₁₉-Lys*₂₀-Glu₂₁-Phe₂₂-Ile₂₃-Lys(N-omga(1-dodecyl beta-D-glucouronyl))₂₄-Trp₂₁-Leu₂₆-Leu₂₇-Gln₂₃-Thr₂₉-NH₂; (SEQ. ID. NO. 1114)

His₁-Aib₂-Gln₃-Gly₄-Thr₅-Phe₆-Thr₇-Ser₈-Asp₉-Tyr₁₀-Ser₁₁-Lys₁₂-Tyr₁₃-Leu₁₄-Asp₁₅-Glu*₁₆-Lys(N-omega(1-tetradecyl alpha-D-melibiouronyl))₁; Ala₁₈-Ala₁₉-Lys*₂₀-Gu₂₁-Phe₂₂-Ile₂₃-Lys(N-omega(1-tetradecyl beta-D-glucouronyl))₂₄-Trp₂₅-Leu₂₆-Leu₂₇-Gln₂₈-Thr₂₉-NH₂; (SEQ. ID. NO. 1115)

His₁-Aib₂-Gln₃-Gly₄-Thr₅-Phe₆-Thr₇-Ser₈-Asp₉-Tyr₁₀-Ser₁₁-Lys₁₂-Tyr₁₃-Leu₁₄-Asp₁₅-Glu₁₆-Lys(N-omega(1-hexadecyl alpha-D-melibiouronyl))₁₇-Ala₁₈-Ala₁₉-Lys*₂₀-Glu₂₁-Phe₂₂-Ile₂₃-Lys(N-omega(1-hexadecyl beta-D-glucouronyl))₂₄-Trp₂₅-Leu₂₆-Leu₂₇-Gln₂₈-Thr₂₉-NH₂; (SEQ. ID. NO. 1116)

His₁-Aib₂-Gln₃-Glu₄-Thr₅-Phe₆-Thr₇-Ser₈-Asp₉-Tyr₁₀-Ser₁₁-Lys₁₂-Tyr₁₃-Leu₁₄-Asp₁₅-Glu₁₆-Lys(N-omega(1-(13-carboxyl-tridecyloxy) beta-D-glucuronyl))₁₇ Ala₁₈-Ala₁₉-Lys*₂₀-Glu₂₁-Phe₂₂-Ile₂₃-Gln₂₄-Trp₂₅-Leu₂₆-Leu₂₇-Gln₂₈-Thr₂₉-NH₂; (SEQ. ID. NO. 1117)

His₁-Aib₂-Gln₃-Gly₄-Thr₅-Phe₆-Thr₇-Ser₈-Asp₉-Tyr₁₀-Ser₁₁-Lys₁₂-Tyr₁₃-Leu₁₄-Asp₁₅-Glu*₁₆-Lys(N-omega(1-15-carboxyl-pentadecyloxy) beta-D-glucuronyl))₁₇ Ala₁₈-Ala₁₉-Lys*₂₀-Glu₂₁-Phe₂₂-Ile23-Gln₂₄-Trp₂₅-Leu₂₆-Leu₂₇-Gln₂₈-Thr₂₉-NH₂; (SEQ. ID. NO. 1118).

His₁-Aib₂-Gln₃-Gly₄-Thr₅-Phe₆-Thr₇-Ser₈-Asp₉-Tyr₁₀-Ser₁₁-Lys₁₂-Tyr₁₃-Leu₁₄-Asr₁₅-Glu*₁₆-Lys(N-omega(1-(17-carboxyl-heptadecyloxy) beta-D-glucuronyl))₁₇ Ala₁₈-Ala₁₉-Lys*₂₀-Glu₂₁ Phe₂₂-lIe₂₃-Gln₂₄-Trp₂₅-Leu₂₆-Leu₂₇-Gln₂₈-Thr₂₉-NH₂; (SEQ. ID. NO. 1119)

His₁-Aib₂-Gln₃-Gly₄-Thr₅-Phe₆-Thr₇-Ser₈-Asp₉-Tyr₁₀-Ser₁₁-Lys₁₂-Tyr₁₃-Leu₁₄-Asp₁₅-Glu*₁₆-Gln₁₇Ala₁₈-Ala₁₉-Lys*₂₀-Glu₂₁-Phe₂₂-Ile₂₃-Lys(N-omega(1-13-carboxyl-tridecyloxy) beta-D-glucuronyl)₂₄-Trp₂₅-Leu₂₆-Leu₂₇-Gln₂₈-Thr₂₉-NH₂; (SEQ. ID. NO. 1120)

His₁-Aib₂-Gln₃-Gly₄-Thr₅-Phe₆-Thr₇-Ser₈-Asp₉-Tyr₁₀-Ser₁₁-Lys₁₂-Tyr₁₃-Leu₁₄Asp₁₅-Glu*₁₆-Gln₁₇-Ala₁₈-Ala₁₉-Lys*₂₀*Glu₂₁-Phe₂₂-Ile₂₂-Lys(N-omega(1-(15-carboxyl-pentadecyloxy) beta-D-glucuronyl))₂₄-Trp₂₅-Leu₂₆-Leu₂₇-Gln₂₈-Thr₂₉-NH₂; (SEQ. ID. NO. 1121) or

His₁-Aib₂-Gln₃-Gly₄-Thr₅-Phe₆-Thr₇-Ser₈-Asp₉-Tyr₁₀-Ser₁₁-Lys₁₂-Tyr₁₃-Leu₁₄-Asp₁₅-Glu*₁₆-Gln₁₇-Ala₁₈-Ala₁₉-Lys*₂₀-Glu₂₁-Phe₂₂-Ile₂₃-Lys(N-omega(1-(17-carboxyl-heptadecyloxy) beta-D-glucurony))₂₄-Trp₂₅-Leu₂₆-Leu₂₇-Gln₂₈-Thr₂₉-NH₂; (SEQ. ID. NO. 1122).

[0333] In some embodiments of Formula I-A, III-A, or III-B, aa₁₆ and aa₂₀ are cyclized to form a lactam linkage.

[0334] In some embodiments, for any compound of Formula I-A, II-A, or III-B, X comprises a dodecyl, tetradecyl, hexadecyl, or octadecyl alkyl chain.

[0335] In some embodiments, the peptide product is a biologically active peptide product that binds to the GLPIR and/or to the GLCR.

[0336] In a specific embodiment, the peptide products of Formula I-A, III-A, or III-B, described above and herein have the following structure:

[chemical structure]

wherein R^{1a} is a C₁-C₂₀ alkyl chain as described in Table 1 of FIG. 1, R′ is a peptide as described in Table 1 of FIG. 1, Table 2 of FIG. 2, and Table 3 of FIG. 3, W² of Formula I-A is —O—, and W¹ of Formula I-A is —(C═O)NH— and is part of an amide linkage to the peptide R′. In some of such embodiments, R^{1a} is a C₆-C₂₀ alkyl chain. In some of such embodiments, R^{1a} is a C₈-C₂₀ alkyl chain. In some of such embodiments, R^{1a} is a C₁₂-C₂₀ alkyl chain. In some of such embodiments, R^{1a} is a C₂-C₁₆ alkyl chain.

[0337] In embodiments described above, an amino moiety of an amino acid and/or a peptide R′ (e.g., an amino group of an amino acid residue such as a Lysine, or a lysine residue within the peptide R′) is used to form a covalent linkage with a compound of structure:

[chemical structure]

wherein R^{1a} is a C₁-C₂₀ alkyl chain as described above and in Table 1 of FIG. 1, Table 2 of FIG. 2, and Table 3 of FIG. 3.

[0338] In such cases, the amino acid residue having an amino moiety (e.g., a Lysine within the peptide R′) which is used to form a covalent linkage to the compound A described above, is a linker amino acid U which is attached to a surfactant X having the structure of Formula A. Accordingly, as one example, Lys(C12) of Table 1 of FIG. 1, Table 2 of FIG. 2, or Table 3 of FIG. 3 has the following structure:

[chemical structure]

[0339] In some embodiments of Formula I-A, II-A, or III-B, the linkage of the surfactant derived X is connected to the linker amino acid U through a spacer amino acid or peptide which may increase the solubility of the overall structure. Such spacer amino acids or amino acid sequences may be derived from linkage through the amino group of Glu or Lys as illustrated in the following structure. Here the peptide sequence is at the top, the spacer is in the middle and the surfactant derived X is given as C12, representing as an example, 1-dodecyl beta-D-glucoronic acid:

[chemical structure]

[0340] Also contemplated within the scope of the embodiments presented herein are peptide products of Formula I-A derived from melibiose-based surfactants. Thus, as one example, peptides in Table 1 of FIG. 1, Table 2 of Figure 2, Table 3 of FIG. 3, or Table 4 of FIG. 9 comprise a lysine linker amino acid bonded to a melibiouronic acid based surfactant X and having a structure shown below. Such surfactant derived structures X may be of the alpha or beta configuration at the anomeric position of the glycoside (beta shown here):

[chemical structure]

[0341] Also contemplated within the scope of the embodiments presented herein are peptide products of Formula I-A derived from maltouronic acid-based surfactants through binding at either or both carboxylic acid functions. Thus, as one example, peptides in Table 1 of FIG. 1, Table 2 of FIG. 2, or Table 3 of FIG. 3 comprise a lysine linker amino acid bonded to a maltouronic acid based surfactant X and having a structure:

[chemical structure]

[0342] It will be understood that in one embodiment, compounds of Formula I-A are prepared by attaching a lysine to a group X, followed by attachment of additional amino acid residues and/or peptides are attached to the lysine-X compound to obtain compounds of Formula I-A. It will be understood that other natural or non-natural amino acids described herein are also suitable for attachment to the surfactant X and are suitable for attaching additional amino acid/peptides to obtain compounds of Formula I-A. It will be understood that in another embodiment, compounds of Formula I-A are prepared by attaching a full length or partial length peptide to a group X, followed by optional attachment of additional amino acid residues and/or peptides are attached to obtain compounds of Formula I-A.

[0343] In a specific embodiment, provided herein is a compound selected from compounds of Table 1 of FIG. 1, Table 2 of FIG. 2, or Table 3 of FIG. 3.

[0344] Also provided herein are pharmaceutical compositions comprising a therapeutically effective amount of a peptide product described above, or acceptable salt thereof, and at least one pharmaceutically acceptable carrier or excipient.

[0345] In some embodiments of the pharmaceutical compositions, the carrier is an aqueous-based carrier. In some embodiments of the pharmaceutical compositions, the carrier is a nonaqueous-based carrier. In some embodiments of the pharmaceutical compositions, the nonaqueous-based carrier is a hydrofluoroalkane-like solvent that may comprise sub-micron anhydrous α-lactose or other excipients.

[0346] Contemplated within the scope of embodiments presented herein is the reaction of an amino acid and/or a peptide comprising a linker amino acid U bearing a nucleophile, and a group X comprising a bearing a leaving group or a functional group that can be activated to contain a leaving group, for example a carboxylic acid, or any other reacting group, thereby allowing for covalent linkage of the amino acid and/or peptide to a surfactant X via the linker amino acid U to provide a peptide product of Formula I-A.

[0347] Also contemplated within the scope of embodiments presented herein is the reaction of an amino acid and/or a peptide comprising a linker amino acid U bearing a bearing a leaving group or a functional group that can be activated to contain a leaving group, for example a carboxylic acid, or any other reacting group, and a group X comprising a nucleophilic group, thereby allowing for covalent linkage of the amino acid and/or peptide to a surfactant X via the linker amino acid U to provide a peptide product of Formula I-A.

[0348] It will be understood that, in one embodiment, Compounds of Formula I-A are prepared by reaction of a linker amino acid U with X, followed by addition of further residues to U to obtain the peptide product of Formula I-A. It will be understood that in an alternative embodiment, Compounds of Formula I-A are prepared by reaction of a suitable peptide comprising a linker amino acid U with X, followed by optional addition of further residues to U, to obtain the peptide product of Formula I-A.

[0349] Further provided herein are methods for synthesizing peptide products described above, comprising sequential steps of
[0350] (a) Coupling a peptide with an intermediate, i.e., a compound of Formula IV:

[chemical structure]

[0351] wherein:
[0352] R^{1a} is independently, at each occurrence, a bond, H, a saccharide, a leaving group, a protecting group, a natural or unnatural amino acid, a substituted or unsubstituted C₁-C₃₀ alkyl group, a substituted or unsubstituted alkoxyaryl group, or a substituted or unsubstituted aralkyl group;
[0353] R^{1b}, R^{1c}, and R^{1d} are each independently, at each occurrence, a bond, H, a leaving group, a protecting group, a reversibly protected natural or unnatural amino acid, a substituted or unsubstituted C₁-C₃₀ alkyl group, a substituted or unsubstituted alkoxyaryl group, or a substituted or unsubstituted aralkyl group;
[0354] W¹ is —CH₂—, —CH₂—O—, —(C═O), —(C═O)—O—, —(C═O)—NH—, —(C═S)—, —(C═S)—NH—, or —CH₂—S—;
[0355] W² is —O—, —CH₂— or —S—;
[0356] R² is independently, at each occurrence, a bond to U, H, a substituted or unsubstituted C₁-C₃₀ alkyl group, a substituted or unsubstituted alkoxyaryl group, or a substituted or unsubstituted aralkyl group, —NH, —S—, -triazolo-, —NH(C═O)—CH₂—, —(CH₂)ₘ-maleimide-;
[0357] n is 1,2 or 3;
[0358] m is integer of 1-10;
[0359] and
[0360] (b) optionally deprotecting the coupled peptide of step (a).

[0361] In some embodiments of the methods, each natural or unnatural amino acid is independently, at each occurrence, a reversibly protected linker amino acid. In some embodiments of the methods, each natural or unnatural amino acid is independently, at each occurrence, a reversibly protected or free lysine.

[0362] In some embodiments of the methods, the peptide is a peptide of Formula II as described above.

[0363] In some embodiments of the methods,
[0364] n is 1:
[0365] W¹ is —(C═O)—;
[0366] R^{1a} is a substituted or unsubstituted C₁-C₃₀ alkyl group, a substituted or unsubstituted 1-alkoxyaryl group, or a substituted or unsubstituted 1-aralkyl group,
[0367] R² is a reversibly-protected lysine of D-or L-configuration.

[0368] In some embodiments of the methods,
[0369] n is 1;
[0370] W¹ is —(C═O)—;
[0371] R^{1a} is a substituted or unsubstituted C₈-C₃₀, alkyl group, a substituted or unsubstituted 1-alkoxyaryl group, or a substituted or unsubstituted 1-aralkyl group,
[0372] R² is a reversibly protected lysine of D-or L- configuration.

[0373] In some embodiments of the methods, R¹ is an octyl, decyl, dodecyl, tetradecyl, or hexadecyl group.

[0374] In some embodiments described above and herein, R^{1a} is a saccharide. In some embodiments, the saccharide is a galactose, in certain embodiments, the saccharide is an alpha-linked galactose. In other embodiments, the saccharide is alpha-linked galactopyranose, beta-linked galactopyranose, alpha-linked galactofuranose, or beta-linked galactofuranose.

[0375] In some embodiments of the methods,
[0376] n is 1;
[0377] W¹ is —(C═O)—NH— or —(C═O)—O—;
[0378] R² is a substituted or unsubstituted C₁-C₃ alkyl hydrophobic group, a substituted or unsubstituted 1-alkoxyaryl group, or a substituted or unsubstituted 1-aralkyl group,
[0379] R^{1a} is a reversibly protected serine or threonine of D-or L- configuration.

[0380] In some embodiments of the methods, R² is an octyl, decyl, dodecyl, tetradecyl or hexadecyl group.

[0381] In some embodiments of the methods,
[0382] n is 1;
[0383] m is 1-6;
[0384] W¹ is —CH₂—;
[0385] R^{1a} is a substituted or unsubstituted C₁-C₃₀ alkyl hydrophobic group, a substituted or unsubstituted 1-alkoxyaryl group, or a substituted or unsubstituted 1-aralkyl group,
[0386] R² is -triazolo-, —NH—, —(CH₂)ₘ-maleimide-, NH—(C═O)—CH₂—.

[0387] In some embodiments of Formula IV,
[0388] n is 1;
[0389] W¹ is —(C═CO)—O—;
[0390] R² is H,
[0391] R^{1a} is a substituted or unsubstituted C₁-C₃₀ alkyl hydrophobic group.

[0392] In some embodiments of the methods, W¹ is —(CH₂)O. In some embodiments of the methods, n is L. In some embodiments of the methods, n is 2, and a first glycoside is attached to a second glycoside via bond between W² of the first glycoside and any one of OR^{1b}, OR^{1c} or OR^{1d} of the second glycoside.

[0393] In some embodiments of the methods, n is 3, and a first glycoside is attached to a second glycoside via bond between W² of the first glycoside and any one of OR^{1b}, OR^{1c} or OR^{1d} of the second glycoside, and the second glycoside is attached to a third glycoside via bond between W¹ of the second glycoside and any one of OR^{1b}, OR^{1c} or OR^{1d} of the third glycoside.

[0394] In some embodiments of the methods, the compound of Formula IV is a reversibly protected N-ε-(1′-alkyl glucuronyl)-lysine of the D-or L- configuration, wherein R is a substituted or unsubstituted C₁-C₂₀ alkyl chain, a substituted or unsubstituted 1-alkoxyaryl group, or a substituted or unsubstituted 1-aralkyl group.

[0395] In some embodiments of the methods, the compound of Formula IV is a reversibly protected N-ε-(1′-dodecyl β-D-glucuronyl)-lysine of the D-or L-configuration.

[0396] In some embodiments of the methods, the deprotecting comprises the use of mild acid and or mild base treatments. In some embodiments of the methods, the deprotecting comprises the use of strong acids.

[0397] In some embodiments, the methods further comprise the steps of chromatography, desalting of intermediates by reversed-phase, high-performance liquid chromatography or ion exchange chromatography of intermediates.

[0398] A pharmaceutical composition comprising a therapeutically effective amount of a peptide product described above and herein, or acceptable salt thereof, and at least one pharmaceutically acceptable carrier or excipient.

[0399] Provided herein is a method for treating a condition associated with insulin resistance comprising administration of any peptide product or compound described herein to an individual in need thereof.

[0400] Provided herein are methods for treating diabetes, diabetic retinopathy, diabetic neuropathy, diabetic nephropathy, wound healing, insulin resistance, hyperglycemia, hyperinsulinemia, metabolic syndrome, diabetic complications, elevated blood levels of free fatty acids or glycerol, hyperlipidemia, obesity, hypertriglyceridemia, atherosclerosis, acute cardiovascular syndrome, infarction, ischemic reperfusion or hypertension, comprising administering a therapeutically effective amount of a peptide product described above and herein to an individual in need thereof.

[0401] Provided herein are methods of reducing weight gain or inducing weight loss comprising administering to a subject in need thereof a therapeutically effective amount of a peptide product described above and herein to an individual in need thereof.

[0402] Provided herein are methods for treating mammalian conditions characterized by obesity-linked insulin resistance or the metabolic syndrome comprising administering to a subject in need thereof a weight loss-inducing or insulin-sensitizing amount of a peptide product described above and herein to an individual in need thereof.

[0403] In some embodiments, the condition to be treated is the metabolic syndrome (Syndrome X). In some embodiments, the condition to be treated is diabetes. In some embodiments, the condition to be treated is hyperlipidemia. In some embodiments, the condition to be treated is hypertension. In some embodiments, the condition to be treated is vascular disease including atherosclerosis, or the systemic inflammation characterized by elevated C reactive protein.

[0404] In some embodiments of the methods, the effective amount of the peptide product for administration is from about 0.1 μg/kg/day to about 100.0 μg/kg/day, or from 0.01 μg/kg/day to about 1 mg/kg/day or from 0.1 μg/kg/day to about 50 mg/kg/day. In some embodiments, the peptide product is administered parenterally. In some embodiments, the peptide product is administered subcutaneously. In some embodiments, the method of administration of the peptide product is nasal insufflation.

[0405] It will be understood, however, that the specific dose level and frequency of dosage for any particular subject in need of treatment may be varied and will depend upon a variety of factors including the activity of the specific compound employed, the metabolic stability and duration of action of that compound, the age, body weight, general health, sex, diet, mode and time of administration, rate of excretion, drug combination, the severity of the particular condition, and the host undergoing therapy.

[0406] Provided herein are methods of treating the metabolic syndrome, or its component diseases, comprising administering to a subject in need thereof a therapeutically effective amount of a peptide product described above, in some embodiments, the metabolic syndrome condition has progressed to diabetes.

[0407] Also provided herein is a covalently modified GLCR and/or GLPIR binding peptide or analog thereof, comprising a hydrophilic group as described herein; and a hydrophobic group covalently attached to the hydrophilic group. In specific embodiments, the covalently modified peptide and/or protein product comprises a hydrophilic group that is a saccharide and a hydrophobic group that is a C₁-C₂₀ alkyl chain or an aralkyl chain.

[0408] In one embodiment, provided is a method for chemically modifying a molecule by covalent linkage to a surfactant to increase or sustain the biological action of the composition or molecule, for example, receptor binding or enzymatic activity. In some embodiments, the molecule is a peptide. The method additionally can include further modification comprising covalent attachment of the molecule in the composition to a polymer such as polyethylene glycol.

[0409] In another embodiment, provided is a method of reducing or eliminating immunogenicity of a peptide and/or protein drug by covalently linking the peptide chain to at least one alkyl glycoside wherein the alkyl has from 1 to 30 carbon atoms.

[0410] Also provided is a method of treating conditions associated with insulin resistance including and not limited to obesity, the metabolic syndrome, type 2 diabetes, hypertension, atherosclerosis or the like, comprising administering a drug composition comprising a peptide covalently linked to at least one alkyl glycoside and delivered to a vertebrate, wherein the alkyl has from 1 to 30 carbon atoms, 1 to 20 carbons, or further in the range of 6 to 16 carbon atoms, or 6 to 18 carbons, and wherein covalent linkage of the alkyl glycoside to the peptide increases the stability, bioavailability and/or duration of action of the drug.

[0411] Further provided herein is the use of a peptide product described herein (e.g., a peptide product of Formula I-A, Formula III-A, or Formula III-B) for the manufacture of a medicament for treatment of any condition described above and herein.

### BRIEF DESCRIPTION OF THE FIGURES

[0412] FIG. 1: Table 1 in FIG. 1 depicts compounds that were prepared by methods described herein. The specification provides sequences for SEQ. ID. Nos. 1-3 and 1108-1111 and SEQ. ID. Nos. 774-783, 785-797 and 1113, and 1025-1029. Additionally, Table 1 of FIG. 1 provides SEQ. ID Numbers for compounds EU-A300 to EU-A425 having SEQ. ID. NOs. 4-129 respectively, as shown in Table 1 of FIG. 1. Compounds in Table 1 of FIG. 1, and their respective SEQ. ID. NOs. shown in Table 1 of FIG. 1 are hereby incorporated into the specification as filed.

[0413] FIG. 2: Table 2 in FIG. 2 depicts compounds that were prepared by methods described herein. The specification provides SEQ. ID. Nos. 1-3 and 1108-1111 and SEQ. ID. Nos. 774-783, 785-797 and 1113, and 1025-1029. Additionally, Table 2 of FIG. 2 provides SEQ. ID Numbers for compounds EU-A426 to EU-A599 having SEQ. ID. NOs. 130-317 respectively, as shown in Table 2 of FIG. 2. Compounds in Table 2 of FIG. 2, and their respective SEQ. ID. NOs. shown in Table 2 of FIG. 2 are hereby incorporated into the specification as filed.

[0414] FIG. 3: Table 3 in FIG. 3 depicts compounds that were prepared by methods described herein. The specification provides SEQ. ID. Nos. 1-3 and 1108-1111 and SEQ. ID. Nos Nos. 774-783, 785-797 and 1113, and 1025-1029. Additionally, Table 3 of FIG. 3 provides SEQ. ID Numbers for compounds EU-A700 to EU-A1174 having SEQ. ID. NOs. 318-773; 798-806 respectively, as shown in Table 3 of FIG. 3. Compounds in Table 3 of FIG. 3, and their respective SEQ. ID. NOs. shown in Table 3 of FIG. 3 are hereby incorporated into the specification as filed.

[0415] FIG. 4: FIG. 4 illustrates the x-ray crystal structure (Runge, S., et al. (2008) J Biol Chen 283: 11340-7) of the binding site of the extracellular domain of the GLP-1 receptor and illustrates critical hydrophobic binding elements of the receptor and the ligand exendin-4 (Val^{19*}, Phe^{22*}, Trp^{25*}, Leu^{26*}) which are mimicked and replaced by the hydrophobic 1′-alkyl portion of the surfactant on the peptides of the invention. In this case the asterisk means the residue is in the ligand.

[0416] FIG. 5: FIG. 5 illustrates the in vivo blood glucose response in db/db mice upon s.c. administration of the listed amount of test compounds of the invention (EU-A993 and EU-A1023) at times t=0, 7 hrs.

[0417] FIG. 6: FIG. 6 illustrates examples of the detailed structure of some compounds of the invention and their linkage through the epsilon amino function of a Lys residue, in this case at position 24, to examples of rono and disaccharide surfactants modified according to one method of the invention.

[0418] FIG. 7: FIG. 7 illustrates the structure of EU-A992, an example of the types of structures of the invention.

[0419] FIG. 8: FIG. 8 illustrates the concentrations of compounds EU-A993, EU-A1023 and the native hormone GLP-1 (7-36) with time during incubation in human plasma. This data illustrates the prolonged half life and protection from proteolysis for the compounds of the invention.

[0420] FIG. 9: Table 4 in FIG. 9 depicts compounds that were prepared by methods described herein. Table 4 of FIG. 9 provides SEQ. ID Numbers for compounds EU-A1575 to EU-A1861 having SEQ. ID. NOs. 807-1024 and 1030-1098, as shown in Table 4 of FIG. 9. Compounds in Table 4 of FIG. 9, and their respective SEQ. ID. NOs. shown in Table 4 of FIG. 9 are hereby incorporated into the specification as filed.

[0421] FIG. 10: FIG. 10 shows the weight loss in DIO mice under treatment with the exemplary compound EU-A1024.

[0422] FIG. 11: FIG. 11 shows the change in fat mass and lean mass as measured by NMR in DIO mice under treatment with the exemplary compound EU-A1024.

### DETAILED DESCRIPTION OF THE INVENTION

[0423] Described herein are certain covalently modified peptides and/or proteins with improved pharmaceutical properties. Also provided herein are methods for use of the covalently modified peptides and/or proteins for treatment of disorders related to obesity and the metabolic syndrome.

[0424] In some embodiments, the modified peptides and/or proteins comprise a peptide and/or protein covalently attached to a hydrophilic group, a “head” (e.g., a polyol, (e.g., a saccharide)); the hydrophilic group is covalently attached to a hydrophobic group, a “tail”, thereby generating a surfactant. In some embodiments, use of hydrophobic-linked glycoside surfactant (e.g., alkyl glycoside) moieties for covalent modification of the peptides or proteins (e.g., glucagon or GLP-1 related peptides or the like), prolongs the duration of action of the peptides and/or proteins by multiple mechanisms, including formation of depots of the drug at the site of administration in the body and binding to hydrophobic carrier proteins. In some embodiments, incorporation of steric hindrance into peptide and/or protein structure can prevent approach of proteases to the peptide and/or protein product and thereby prevent proteolysis. In some embodiments, surfactant modification (e.g., covalent attachment of alkyl glycoside class of surfactants) of peptides and/or proteins as described herein, increases the transport across mucosal barriers. Accordingly, the modifications of the peptides and/or proteins described herein provide desirable benefits including and not limited to, protection from proteolysis, and slowed movement from the site of administration, thereby leading to prolonged pharmacokinetic behavior (e.g., prolongation of circulating t_{1/2}) and improved transmucosal bioavailability.

[0425] In some embodiments, interaction of the improved peptides and/or proteins with their receptors is modified in beneficial ways by the truncation of the sequence, introduction of constraint, and/or the incorporation of steric hindrance. Described herein are novel alkyl glycoside reagents that allow for incorporation of both rigidity and steric hindrance in the modified peptides and/or proteins. In some embodiments, steric hindrance confers receptor selectivity to the modified peptides and/or proteins described herein. In some embodiments, steric hindrance provides protection from proteolysis.

[0426] Proteins and peptides undergo numerous physical and chemical changes that may affect potency and safety. Among these are aggregation, which includes dimerization, trimerization, and the formation of higher-order aggregates such as amyloids. Aggregation is a key issue underlying multiple potentially deleterious effects for peptide and/or protein-based therapeutics, including loss of efficacy, altered pharmacokinetics, reduced stability or product shelf life, and induction of undesirable immunogenicity. Bioavailability and pharmacokinetics of a self-associating peptide can be influenced by aggregate size and the ease of disruption of the non-covalent intermolecular interactions at the subcutaneous site (Maji, S. K., et al. (2008) PLoS Biol 6: e17). In some instances, peptides can aggregate into subcutaneous depots that disassociate with t_{1/2} of 30 or more days. Such slow dissolution can lead to favorable effects such as delivery for one month from a single se injection causes such a low blood concentration that the peptide appears inactive in vivo. Thus, in some instances, hydrophobic aggregation precludes a peptide's bioavailability and effectiveness (Clodfelter, D. K., et al. (1998) Pharm Res 15: 254-262). The modified peptide products described herein are surfactant-linked and are optionally designed to allow for either interference with aggregation, or enhanced aggregation, as desired.

[0427] Often naturally occurring oligosaccharides that are covalently attached to proteins do not have surfactant character. In some embodiments, peptide and/or protein products described herein have a covalently attached saccharide and an additional hydrophobic group that confers surfactant character to the modified peptides, thereby allowing for tunability of bioavailability, nununogenicity, and/or pharmacokinetic behavior of the surfactant-modified peptides.

[0428] Proteins and peptides modified with oligosaccharides are described in, for example, Jensen, K. J. and Brask, J. (2005) Biopolymers 80: 747-761, through incorporation of saccharide or oligosaccharide structures using enzymatic (Gijsen, 1-1.J., et al. (1996) Chem Rev 96: 443-474; Sears, P. and Wong, C. H. (1998) Cell Mol Life Sci 54: 223-252; Guo, Z. and Shao, N. (2005) Med Res Rev 25: 655-678) or chemical approaches (Urge, L., et al. (1992) Biochem Biophys Res Commun 184: 1125-1132; Salvador, L. A., et al. (1995) Tetrahedron 51: 5643-5656: Kihiberg, J., et al. (1997) Methods Enzymol 289: ²21-245; Gregoriadis, G., et al. (2000) Cell Mol Life Sci 57: 1964-1969; Chakraborty, T. K., et al. (2005) Glycoconj J 22: 83-93; Lin, M., et alt (2005) Carbohydr Res 340: 2111-2122; Payne, R. J., et al. (2007) J Am Chem Soc 129: 13527-13536; Pedersen, S. L., et al. (2010) Chembiochem 11: 366-374). Peptides as well as proteins have been modified by glycosylation (Filira, F., et al. (2003) Org Biomol Chem 1: 3059-3063); (Negri, L., et al. (1999) J Med Chem 42: 400-404); (Negri, L., et al. (1998) Br J Pharmacol 124: 1516-1522); Rocchi, R., et al. (1987) Int J Pept Protein Res 29: 250-261; Filira, F., et al. (1990) tnt J Biol Macromol 12: 41-49; Gobbo, M., et al. (1992) Int J Pept Protein Res 40: 54-61; Lrge, L., et al. (1992) BiochemBiophys Res Commun 184: 1125-1132; Diedaini-Pilard, F., et al. (1993) Tetrahedron Lett 34: 2457-2460; Drouillat, B., et al. (1997) Bioorg Med Chem Lett 7: 2247-2250; Lohof, E., et at (2000) Angew Chem Int Ed Engl 39: 2761-2764; Gruner, S. A., et al. (2001) Org Lett 3: 3723-3725; Pean, C., et al. (2001) Biochim Biophys Acta 1541: 150-160; Filira, F., et al. (200³) Org Biomol Chem 1: 3059-3063; Grotenbreg, G. M., et al. (2004) J Org Chem 69: 7851-7859; Biondi, L., et al. (2007) J Pept Sci 13: 179-189; Koda, Y., et al. (2008) Bioorg Med Chem 16: 6286-6296; Yamamoto, T., et al. (2009) J Med Chem 52: 5164-5175).

[0429] However, the aforementioned attempts do not describe an additional hydrophobic group attached to the peptide-linked oligosaccharide. Accordingly, provided herein are modified peptides and/or proteins that incorporate a hydrophobic group attached to a saccharide and/or oligosaccharide that is covalently attached to the peptide and/or protein and that allow for tunability of bioavailability, imnninogenicity and pharmacokinetic behavior. Accordingly, also provided herein are surfactant reagents comprising an oligosaccharide and a hydrophobic group, that allow for covalent modification of peptides and/or proteins such as, for example, glucagon and/or GLP-1 and/or analogs thereof.

[0430] Provided herein is the use of saccharide-based surfactants in covalent linkage to a peptide for improvement of peptide and/or protein properties. In some embodiments, surfactant modification (e.g., covalent attachment of alkyl glycoside class of surfactants) of peptides and/or proteins as described herein, increases the transport across mucosal barriers. In some embodiments, covalent attachment of a surfactant to a peptide and/or protein product reduces or prevents aggregation of the peptide and/or protein. In some embodiments, the covalently modified peptides and/or proteins are covalently modified glucagon or GLP-1 peptides, or analogs thereof, which are modified to improve their pharmaceutical and medical properties by covalent modification with alkyl glycoside surfactant moieties. These surfactant-modified analogs have increased steric hindrance that hinder proteolysis, slows uptake and slows clearance from the body.

[0431] In certain instances, the effects of surfactants are beneficial with respect to the physical properties or performance of pharmaceutical formulations, but are irritating to the skin and/or other tissues and in particular are irritating to mucosal membranes such as those found in the nose, mouth, eye, vagina, rectum, buccal or sublingual areas. Additionally, in some instances, surfactants denature proteins thus destroying their biological function. Since surfactants exert their effects above the critical micelle concentration (CMC), surfactants with low CMC's are desirable so that they may be utilized with effectiveness at low concentrations or in small amounts in pharmaceutical formulations. Accordingly, in some embodiments, surfactants (e.g., alkyl glycosides) suitable for peptide modifications described herein have the CMC's less than about 1 mM in pure water or in aqueous solutions. By way of example only, certain CMC values for alkyl glycosides in water are: Octyl maltoside 19.5 mM; Decyl maltoside 1.8 mM; Dodecyl-β-D-maltoside 0.17 mM; Tridecyl maltoside 0.03 mM; Tetradecyl maltoside 0.01 mM; Sucrose dodecanoate 0.3 mM. It will be appreciated that a suitable surfactant could have a higher or lower CMC depending on the peptide and for protein that is modified. As used herein, “Critical Micelle Concentration” or “CMC” is the concentration of an amphiphilic component (alkyl glycoside) in solution at which the formation of micelles (spherical micelles, round rods, lamellar structures etc.) in the solution is initiated. In certain embodiments, the alkyl glycosides dodecyl, tridecyl and tetradecyl maltoside or glucoside as well as sucrose dodecanoate, tridecanoate, and tetradecanoate are possess lower CMC's and are suitable for peptide and/or protein modifications described herein.

### Insulin Resistance

[0432] The risks associated with prolonged hyperglycemia include an increased risk of microvascular complications, sensory neuropathy, myocardial infarction, stroke, macrovascular mortality, and all-cause mortality. Type 2 diabetes is also linked causally with obesity, an additional global epidemic. At least $232 billion were spent on treatment and prevention of diabetes worldwide in 2007, with three quarters of that amount spent in industrialized countries on the treatment of long-term complications and on general care, such as efforts to prevent micro and macrovascular complications. In 2007, estimated indirect costs of diabetes (disability, lost productivity, and premature death due to diabetes) to the United States economy were $58 billion.

[0433] Obesity leads to insulin resistance, a decreased ability of the cells in the body to react to insulin stimulation through decreased numbers of insulin receptors and a decreased coupling of those receptors to critical intracellular signaling systems. The obese state further leads to the “metabolic syndrome”, a constellation of diseases (insulin resistance, hypertension, atherosclerosis, et al.) with very large healthcare consequences. If insulin resistance is diagnosed early enough, overt type 2 diabetes can be prevented or delayed, with lifestyle interventions aimed at reducing calorie intake and body fat and through drug treatment to normalize glycemic control. Despite treatment guidelines recommending early, aggressive intervention, many patients fail to reach targets for glycemic control. Many factors contribute to the failure to manage type 2 diabetes successfully including psychosocial and econoric influences and shortcomings in the efficacy, convenience and tolerability profiles of available antidiabetic drugs. The peptide and/or protein products described herein are designed to overcome these shortcomings.

### Incretin Effect

[0434] The “incretin effect” is used to describe the phenomenon whereby a glucose load delivered orally produces a much greater insulin secretion than the same glucose load administered intravenously. This effect is mediated by at least two incretin hormones secreted by intestinal L-cells. Glucose-dependent insulinotropic polypeptide (GIP) and glucagon-like peptide 1 (GLP-1) were identified as incretins and it is thought that healthy individuals may derive up to 70% of their prandial insulin secretory response from the incretin effect.

[0435] Normally the incretin peptides are secreted as needed, in response to ingested nutrients, and have a short plasma half-life due to degradation by dipeptidyl peptidase IV (DPP-4) enzyme. In people with type 2 diabetes, pancreatic responsiveness to GLP-1 is impaired, but the insulin-secretory response can be restored with pharmacologic doses of human GLP-1(Kieffer, T. J., et at (1995) Endocrinology 136: 3585-3596). In addition, GLP-1 promotes beta-cell neogenesis and preservation (Aaboe, K., et al. (2008) Diabetes Obes Metab 10: 994-1003). GLP-1 has additional beneficial effects such as on cardiac function (Treiman, M., et al. (2010) Trends Cardiovasc Med 20: 8-12): for example it improves left ventricular function (Sokos, G. G., et al. (2.006) J Card Fail 12: 694-699) in human subjects. GLP-1 also slows gastric emptying in humans and reduces appetite (Toft-Nlelsen, M. B., et al. (1999) Diabetes Care 22: 1137-1143).

[0436] Treatment of diabetes patients with metabolically stable and long-acting analogs of GLP-1 is described in, for example, Drab, S. R. (2010) Pharmacotherapy 30: 609-624, suffers from issues related to convenience of use and side effects such as nausea, risk of pancreatitis and thyroid carcinoma. GLP-1 analogs provide glucose-dependent stimulation of insulin secretion and lead to a reduced risk of hypoglycemia. In addition, while a number of the current treatments for diabetes cause weight gain, as described below, GLP-1 analogs induce satiety and a muld weight loss. Accordingly, in some embodiments, provided herein are GLP-1 analogs that are long acting and are administered at low doses thereby reducing side-effects associated with current treatments.

[0437] A number of peptide gut hormones are known to modulate appetite (Sanger, G J. and Lee, K. (2008) Nat Rev Drug Discov 7: 241-254). Several peptides are derived from tissue-specific, enzymatic processing (prohormone convertases; PCs) of the preproglucagon gene product: e.g. glucagon, GLP-1, glucagon-like peptide-2 (GLP-2), glicentin and oxyntomodulin (OXM) (Drucker, D. J. (2005) Nat Clin Pract Endocrinol Metab 1: 22-31; Sinclair, E. M. and Drucker, D. J. (2005) Physiology (Bethesda) 20: 357-365). GLP-1, GLP-2, glicentin and OXM are co-secreted from L-cells in the gut in response to feeding. Preproglucagon is alternatively processed (PC2) to produce glucagon in the alpha cells in the pancreatic islets. The structure of OXM is essentially glucagon with a C-terminal extension of 8 residues.

[0438] In addition to the stimulation of insulin biosynthesis and of glucose-dependent insulin secretion, GLP-1 and its stable mimetics (e.g. exendin-4, liraglutide) also cause modest weight loss in animal models (Mack, C. M., et at (2006) Int J Obes (Lond) 30: 1332-1340; Knudsen, L. B. (2010) Int J Clin Pract 64 (Suppl 167): 4-11) and in Type 2 diabetic patients (DeFronzo, R. A., et al. (2005) Diabetes Care 28: 1092-1100; Buse, J. B., et at (2010) Diabetes Care 33: 1255-1261). Glucagon infusion reduces food intake in man (Geary, N., et al. (1992) Am J Physiol 262: R975-980), while continuous glucagon treatment of adipose tissue also promotes lipolysis (Heckemeyer, C. M., et al. (1983) Endocrinology 113: 270-276) and weight loss (Salter, J. M., et al. (1960) Metabolism 9: 753-768; Chan, E. K., et al. (1984) Exp Mo]Pathol 40: 320-327). Glucagon has wide-ranging effects on energy metabolism (Heppner, K. M., et a]. (2010) Physiol Behav). Glucagon, or analogs, can be used in a diagnostic mode for temporary paralysis of the intestinal tract. Thus at least two of the products from PC processing of the preproglucagon protein are linked to satiety and metabolic effects.

[0439] In rodents, repeated intraperitoneal administration of OXM, a third product of preproglucagon, has been associated with reduced white adipose tissue and a reduction in weight compared with controls (Dakin, C. L., et al. (2004) Endocrinology 145: 2687-2695). Oxm reduced food intake by 19.3% during an intravenous infusion administration to normal-weight humans and this effect continues for more than 12 hr. after infusion (Cohen, M. A., et al, (2003) J Clin Endocrinol Metab 88: 4696-4701). Treatment of volunteers over a 4 week period resulted in a sustained satiety effect and weight loss reflecting a decrease in body fat (Wynne, K., et at (2005) Diabetes 54: 2390-2395).

[0440] OXM is structurally homologous with GLP-1 and glucagon, and activates both the glucagon receptor (GCGR) and the GLP-1 receptor (GLP1R), but with 10 to 100 fold less potency than the eponymous ligands. In addition, study of OXM interactions with GLP1 R suggest it might have different effects on beta-arrestin recruitment compared to GLP-1 (Jorgensen, R., et al (2007) J Pharmacol Exp Ther 322: 148-154), thus acting as a “biased” ligand. A unique receptor for OXM was sought for a number of years, but has not yet been elucidated and it is assumed to act through the GLPIR and GCGR pathways. Accordingly, provided herein are methods for surfactant modification of gut peptides that allow for induction of satiety, weight loss, alleviation of insulin resistance and/or delay in progression of pre-diabetes to diabetes.

### GLP-1

[0441] In view of the complex and interacting behavior of the products of the preproglucagon protein on satiety and metabolism described above, workers from multiple groups have studied the structure activity relationships on GLP-1 and glucagon structure. Residues throughout the sequences were shown to accept replacement. For example, replacement by Ala is well accepted in the N-terminal region of GLP-1, especially at 2, 3, 5, 8, 11, and 12 (Adelhorst, K., et al. (1994) J Biol Chem 269: 6275-6278).

[0442] It was shown that chimeric analogs with the ability to bind to GLP1R and GLCR could be achieved by grafting C-terminal residues from GLP-1 onto the N-terminus of glucagon (Hjorth, S. A., et al. (1994) J Biol Chem 269: 30121-30124). The residue at position 3 (acidic Glu in GLP1 or neutral Gln in Glucagon or OXM) reduces the affinity of glucagon (Runge, S., et al. (2003) J Bioi Chem 278: 28005-28010) or OXM (Pocai, A., et al. (2009) Diabetes 58: 2258-2266) for the GiP1R. The effect on metabolic profile of animals treated with stabilized analogs of GLP-1 or glucagon or OXM with Gln in position 3 was studied (Day, J. W., et al. (2009) Nat Chem Biol 5: 749-757; Druce, M. R., et al. (2009) Endocrinology 150: 1712-1722; Poca, A., et al. (2009) Diabetes 58: 2258-2266). These analogs were designed to have agonistic action on both GLP1R and on GCGR (Day, J. W., et al. US 2010/0190701 A1; Patterson, J. T., et al. (201)1 J Pept Sci 17: 659-666; Ribier, D., US Patent Application 2012/0178670).

[0443] Chimeric analogs should have the desirable effects of the parent hormones acting on their receptors, and therefore similar to the effects of OXM, which apparently acts on both GLP-1R and GLCR: glucose-dependent insulin secretion and satiety, coupled with lipolysis and increased burning of fat due to glucagon. The analogs were shown to cause the desired effects of decreased weight and increased burning of fat. Such a profile would be attractive in the treatment of obesity, but a major challenge in obesity treatment is compliance. Although currently known full length analogs of glucagon and OXM, respectively, with affinity for both GLP-1R and GLCR can result in weight loss, these analogs are not optimized for the high bioavailability, pharmaceutical properties, and convenient delivery to patients that are necessary for optimal drug treatment regimens. Accordingly, provided herein are analogs of gut peptides (e.g., GLP, OXM, glucagon or the like) that allow for high bioavailability and/or long lasting effects for improved therapeutic outcome in treatment of conditions such as obesity and/or diabetes and/or the metabolic syndrome.

[0444] Additional factors for optimized treatment of the metabolic syndrome and diabetes with OXM-like molecules relate to the duration of treatment and the amount of glucagon action. For example, continuous treatment with analogs that activate GLP-1 and glucagon receptors (the OXM pharmacological profile) can result in very large and rapid loss of fat mass (Day, J. W., et al. (2009) Nat Chem Biol 5: 749-757), but it can also cause the loss of lean muscle mass (Kosinski, J. R., et al. (2012) Obesity (Silver Spring): doi: 10.1038/oby.2012.67), which is unfavorable for a pharmaceutical in this class. For examp¹e, in the research article by Kosinski, J. R., et al., the naturalhormone Oxm is administered continuously for 14 days from an Alzet minipump and results in a decrease of 30% in fat mass, but also caused a 7% decrease in lean mass (muscle).

[0445] Glucagon action is known to stimulate glycogenolysis, lipolysis and the increased burning of fat, but can also have catabolic effects on muscle. A successful treatment using an agent that combines GLP-1 and glucagon action (the OXM profile) willrneed to optimally cause the satiety and potentiated glucose-dependent insulin secretion of a GLP-1 analog with a judicious amount of glucagon action (fat burning). In addition, intermittent use of such an agent will provide the desired clinical profile of moderate, continuous weight loss, through loss of fat mass, with minimized loss of lean mass. Provided herein are molecules with a desirable combination of GLP-1 and OXM action as well as a tunable pharmacokinetic/pharnmacodynamic profile to allow optimum use in therapy (for example in the metabolic syndrome, diabetes, obesity, and the like).

[0446] In one embodiment, the compounds of Formula I-A. II-A, and III-B are designed to provide either glucagon-like activity or GLP-1 like activity. In a further embodiment, the compounds of Formula I-A, III-A, and III-B provide tunable activity. For example, in one instance, the peptide products described herein (e.g., compounds in Table 1 of FIG. 1, Table 2 of FIG. 2, and Table 3 of FIG. 3) have an EC50 of less than about 500 nM, preferably less than about 50 nM, more preferably less than about 20 nM at receptors for both glucagon, and GLP-1. In another instance, the peptide products described herein (e.g., compounds in Table 1 of FIG. 1, Table 2 of FIG. 2, and Table 3 of FIG. 3) are more potent (e.g., EC50 of less than 10 nM, preferably less than 5 nM, more preferably about 1 nM) for the GLP-1 receptor and less potent for the glucagon receptor (e.g., EC50 of less than 50 nM, preferably less than about 20 nM, more preferably about 5 nM) for the glucagon receptor. This tunability of biological activity allows for some retention of a judicious amount of glucagon action, thereby allowing for fat burning to occur, while also retaining the beneficial effects of potentiated glucose-dependent insulin secretion. OXM is structurally homologous with GLP-1 and glucagon, and activates both the glucagon receptor (GCGR) and the GLP-1 receptor (GLPIR). Accordingly, in sone emodiments, the compounds of Formula I-A, Formula III-A, and Formula III-B provide a tunable OXM-like biological activity. In some specific embodiments, the peptide products described herein comprise a peptide having amino acid residues 1-17 of GLP-1 and/or analogs thereof (e.g., analogs comprising modified non-natural amino acid replacements as described herein, cyclized lactam linkages as described herein, surfactant modifications as described herein, or a combination thereof). In some other embodiments, the peptide products described herein comprise a peptide having amino acid residues 1-16 of GLP-1 and/or analogs thereof (e.g., analogs comprising modified non-natural amino acid replacements as described herein, cyclized lactam linkages as described herein, surfactant modifications as described herein, or a combination thereof). In additional embodiments, the peptide products described herein comprise a peptide having amino acid residues 1-18 of GLP-1 and/or analogs thereof (e.g., analogs comprising modified non-natural amino acid replacements as described herein, cyclized lactam linkages as described herein, surfactant modifications as described herein, or a combination thereof), Additionally the peptide products described herein comprise one or more residues (e.g., Aib, Ac4c) which provide helix stabilization of the designed compounds of Formula I-A, Formula III-A, and Formula III-B, and compounds in Table 1 of FIG. 1, Table 2 of FIG. 2, and Table 3 of FIG. 3.

[0447] It is believed that the glucagon subfamily of ligands bind to their receptors in a two domain mode common to a number of the class B of receptors (secretin class, G Protein-coupled Receptors (GPCR)). For GLP-1 it is felt that there is a N-terminal region of from residue 1 to about residue 16 which binds to the tops of the transmembrane helicies (juxtamembrane region) and a helical C-terminal region from 17 to 31 which binds to the large, extracellular, N-terminal extension (ECD) of the receptor. The binding of these ligands focuses on the fact that N-terminally truncated analogs of these peptide ligands can still retain substantial binding affinity and selectivity for just the isolated ECD region of the receptor. Therefore it has been suggested that the N-terminal region is responsible for receptor activation while the C-terminal region is responsible for binding. It recently has been shown that short, N-terminal analogs of GLP-1 can be both potent binders as well as receptor activators (Mapelli, C., et al. (2009) J Med Chem 52: 7788-7799; Haque, T. S., et alt (2010) Peptides 31: 950-955; Haque, T S., et alt (2010) Peptides 31: 1353-1360).

[0448] In addition, study of an x-ray crystal structure (Runge, S, et al. (2008) J Biol Chem 283: 11340-7) of the N-terminal region of the GLP1R with a truncated antagonist analogs of the GLP-1 mimic, exendin-4 (Byetta), bound in this region show that a critical ligand-binding region in the ECD is of high hydrophobicity (FIG. 3). The sequence of exendin-4 beyond Glu₁₅ interacts as an amphiphilic helix with this very hydrophobic region (Val¹⁹*, Phe^{2*}, Trp^{25*}, Leu^{26*}), wherein in this case the asterisk denotes that it is a residue in the ligand. In one embodiment, truncated N-terminal fragments of GLP-1 or glucagon are modified to bind to GLCR and are covalently linked to a surfactant. The hydrophobic 1′-alkyl portion of the surfactant mimics and replaces the C-terminal region of the native hormone ligand and increases the peptides potency, efficacy, and duration of action. In addition, such analogs have major advantages due to their smaller size, which reduces their complexity, synthesis costs, and susceptibility to proteolysis. In addition smaller peptides are more readily absorbed through the nasal mucosa or gut enterocyte barrier.

[0449] Hypoglycemia is a condition of low blood sugar that can be life-threatening and is increasingly seen as more aggressive treatment of elevated blood sugar by intensive insulin treatment is being used in more patients. Hypoglycemia is seen when blood glucose levels drop too low to provide enough energy to the brain and muscles for the body's activities. Glucagon can be used to treat this condition and does so by stimulating the liver to break down glycogen to generate glucose and cause the blood glucose levels to rise toward the normal value. Analogs of glucagon that retain the ability to activate the GLCR may be used to achieve this desirable effect on blood glucose levels.

[0450] Analogs of GLP-1 that activate the GLPIR stimulate the production and, in the presence of elevated blood glucose levels, release of insulin from the pancreas. This action results in efficient control and normalization of blood glucose levels, as seen with current products such as exenatide (Byetta). In addition, such products appear to produce a decreased appetite and slow the movement of food from the stomach. Thus they are effective in treatment of diabetes through multiple mechanisms. Analogs that combine the effects of glucagon and GLP-1 that activate both the GLCR and the GLPIR may offer a benefit in the treatment of diabetes through a concerted action to suppress appetite, release insulin in a glucose-dependent fashion, assist in the protection from hypoglycemia and accelerate the burning of fat.

[0451] Such methods for treating hyperglycemia, including diabetes, diabetes mellitus type I, diabetes mellitus type 11, or gestational diabetes, either insulin-dependent or non-insulin dependent, are expected to be useful in reducing complications of diabetes including nephropathy, retinopathy and vascular disease. Applications in cardiovascular disease encompass microvascular as well as macrovascular disease (Davidson, M. H., (2011) Am J Cardiol 108[suppl]:33B-41B; Gejl, M., et al. (2012) J Clin Endocrinol Metab 97:doi:10.1210/jc.2011-3456), and include treatment for myocardial infarction. Such methods for reducing appetite or promoting loss of body weight are expected to be useful in reducing body weight, preventing weight gain, or treating obesity of various causes, including drug-induced obesity, and reducing complications associated with obesity including vascular disease (coronary artery disease, stroke, peripheral vascular disease, ischemia reperfusion, etc.), hypertension, onset of diabetes type II, hyperlipidemia and musculoskeletal diseases.

[0452] As used herein, the term glucagon or GLP-1 analogs includes all pharmaceutically acceptable salts or esters thereof.

### Peptides and Analogs Thereof

[0453] In one aspect, the peptides that are covalently modified and are suitable for methods described herein are truncated analogs of glucagon and/or the related hormone GLP-1, including and not limited to:

### Glucagon:

(SEQ. ID. NO. 782)
His₁-Ser₂-Gln₃-Gly₄-Thr₅ Phe₆-Thr₇-Ser₈-Asp₉-
Tyr₁₀-Ser₁₁-Lys₁₂-Tyr₁₃-Leu₁₄-Asp₁₅-Ser₁₆-Arg₁₇-
Arg₁₈-Ala₁₉-Gln₂₀-Asp₂₁-Phe₂₂-Val₂₃-Gln₂₄-Trp₂₅-
Leu₂₆-Met₂₇-Asn₂₈-Thr₂₉

### Oxyntomodulin:

(SEQ. ID. NO. 783)
His₁-Ser₂-Gln₃-Gly₄-Thr₅ Phe₆-Thr₇-Ser₈-Asp₉-
Tyr₁₀-Ser₁₁-Lys₁₂-Tyr₁₃-Leu₁₄-Asp₁₅-Ser₁₆-Arg₁₇-
Arg₁₈-Ala₁₉-Gln₂₀-Asp₂₁-Phe₂₂-Val₂₃-Gln₂₄-Trp₂₅-
Leu₂₆-Met₂₇-Asn₂₈-Thr₂₉-Lys₃₀-Arg₃₁-Asn₃₂-Arg₃₃-
Asn₃₄-Asn₃₅-Ile₃₆-Ala₃₇

GLP-1 (using glucagon numbering):

(SEQ. ID. NO. 1123)
His₁-Ala₂-Glu₃-Gly₄-Thr₅ Phe₆-Thr₇-Ser₈-Asp₉-
Val₁₀-Ser₁₁-Ser₁₂-Tyr₁₃-Leu₁₄-Glu₁₅-Gly₁₆-Gln₁₇-
Ala₁₈-Ala₁₉-Lys₂₀-Glu₂₁-Phe₂₂-Ile₂₃-Ala₂₄-Trp₂₅-
Leu₂₆-Val₂₇-Lys₂₈-Gly₂₉-Arg₃₀

[0454] In some embodiments, a peptide product described herein has the structure:

Formula II
(SEQ. ID. NO. 1)
aa₁-aa₂-aa₃-aa₄-aa₅-aa₆-aa₇-aa₈-aa₉-aa₁₀-aa₁₁-
aa₁₂-aa₁₃-aa₁₄-aa₁₅-aa₁₆-aa₁₇-aa₁₈-aa₁₉-aa₂₀-aa₂₁-
aa₂₂-aa₂₃-aa₂₄-aa₂₅-aa₂₆-aa₂₇-aa₂₈-aa₂₉-aa₃₀-aa₃₁-
aa₃₂-aa₃₃-aa₃₄-aa₃₅-aa₃₆-aa₃₇-Z

[0455] wherein:
   [0456] Z is OH, N—R⁴-His, or —N—R³, wherein R³ is 1H, C₁-C₁₂ substituted or unsubstituted alkyl, or a PEG chain of less than 10 Da; and R⁴ is a C₂-C_{1g} acyl group, for example Ac or Bz;
   [0457] aa₁ is His, N—R⁴-His, p Glu-His, or N—R³-His;
   [0458] aa₂ is Ser, D-Ser, Ala, Gly, Pro, MePro, Aib, Ac4c, or Ac5c;
   [0459] aa₃ is Gln, or Cit;
   [0460] aa₄ is Gly, or D-Ala;
   [0461] aa₅ is Thr, or Ser;
   [0462] aa₆ is Phe, Trp, 2FPhe, MePhe, 2FMePhe, or Nal2;
   [0463] aa₇ is Thr, or Ser;
   [0464] aa₈ is Ser, or Asp;
   [0465] aa₉ is Asp, or Glu;
   [0466] aa₁₀ is Tyr, Leu, Met, Nal2, Bip, Bip2EtMeO or U;
   [0467] aa₁₁ is absent or Ser, Asn, Bip or U;
   [0468] aa₁₂ is absent or Lys, Glu, Ser, Arg, or U;
   [0469] aa₁₃ is absent or Tyr, Gln, Cit, or U;
   [0470] aa₁₄ is absent or Leu, Met, Nle, or U;
   [0471] aa₁₅ is absent or Asp, Gln, or U;
   [0472] aa₁₆ is absent or Ser, Gly, Glu, Ala, Aib, Ac5c, Lys, Arg, or U;
   [0473] aa₁₇ is absent or Arg, hArg, Gln, Glu, Cit, Aib, Ac4c, Ac5c, Lys, or U;
   [0474] aa₁₈ is absent or Arg, hArg, Ala, Aib. Ac4c, Ae5c, or U;
   [0475] aa₁₉ is absent or Ala, Val, Aib, Ae4c. Ac5c, or U;
   [0476] aa₂₀ is absent or Gln, Lys, Arg, Cit, Glu, Aib, Ac4c, Ac5c, or U;
   [0477] aa₂₁ is absent or Asp, Glu, Leu, Aib, Ac4c, Ae5c, or U;
   [0478] aa₂₂ is absent or Phe, Trp, Nal2, Aib, Ac4c. Ac5c, or U
   [0479] aa₂₃ is absent or Val, Ile, Aib, Ac4c, Ac5c, or U;
   [0480] aa₂₄ is absent or Ala, Gln, Glu, Cit, or U;
   [0481] aa₂₅ is absent or Trp, Nal2, or U;
   [0482] aa₂₆ is absent or Leu, or U;
   [0483] aa₂₇ is absent or Met, Val, Leu, Nle, Lys, or U;
   [0484] aa₂₈ is absent or Asn, Lys, Gln, Cit, or U;
   [0485] aa₂₉ is absent or Thr, Gly, Aib, Ac4c, Ac5c, or U;
   [0486] aa₃₀ is absent or Lys, Aib, Ac4c. Ac5c, Arg, or U;
   [0487] aa₃₁ is absent or Arg, Aib, Ac4c, Ac5c, or U;
   [0488] aa₃₂ is absent or Asn, Aib, Ac4c, Ac5c, or U;
   [0489] aa₃₃ is absent or Arg, Aib, Ac4c, Ac5c, or U;
   [0490] aa₃₄ is absent or Asn, Aib, Ac4c, Ac5c, or U;
   [0491] aa₃₅ is absent or Asn, Aib, Ac4c, Ac5c, or U;
   [0492] aa₃₆ is absent or Ile, Aib, Ac4c, Ac5C, or U;
   [0493] aa₃₆ is absent or Ala, Aib, Ac4c, Ac5C, or U;
   [0494] aa₃₇ absent or U;
   [0495] U is a natural or unnatural amino acid comprising a functional group used for covalent attachment to the surfactant X;
[0496] wherein any two of aa₁-aa₃₇ are optionally cyclized through their side chains to form a lactam linkage; and
[0497] provided that one, or at least one of aa₁₀-aa₃₇ is the linker amino acid U covalently attached to X.

[0498] In specific embodiments, the linking amino acid U, is a diamino acid like Lys or Orn, X is a modified surfactant from the 1-alkyl glycoside class linked to U, and Z is OH, or —NH—R₂, wherein R³ is H or C₁-C₁₂; or a PEG chain of less than 10 Da.

[0499] In some embodiments, the peptide product of Formula I-A has the structure of Formula III-A:

Formula III-A
(SEQ. ID. NO. 2)
aa₁-aa₂-aa₃-aa₄-aa₅-aa₆-aa₇-aa₈-aa₉-aa₁₀-aa₁₁-
aa₁₂-aa₁₃-aa₁₄-aa₁₅-aa₁₆-aa₁₇-aa₁₈-aa₁₉-aa₂₀-aa₂₁-
aa₂₂-aa₂₃-aa₂₄-aa₂₅-aa₂₆-aa₂₇-aa₂₈-aa₂₉-Z

[0500] wherein:
[0501] Z is OH, or —NH—R³, wherein R³ is H, or C₁-C₁₂ substituted or unsubstituted alkyl, or a
[0502] PEG chain of less than 10 Da;
[0503] aa₁ is His, N—Ac-His, pGlu-His, or N—R³-His;
[0504] aa₂ is Ser, Ala, Gly, MePro, Aib, Ac4c, or Ac5c;
[0505] aa₃ is Gln, or Cit;
[0506] aa₄ is Gly, or D-Ala;
[0507] aa₅ is Thr, or Ser;
[0508] aa₆ is Phe, Trp, 2FPhe, MePhe, 2FMePhe, or Nal2;
[0509] aa₇ is Thr, or Ser;
[0510] aa₈ is Ser, or Asp;
[0511] aa₉ is Asp, or Glu;
[0512] aa₁₀ is Tyr, Leu, Met, Nal2, Bip, Bip2EtMeO or U(X);
[0513] aa₁₁ is absent or Ser, Asn, Bip or U(X);
[0514] aa₁₂ is absent or Lys, Glt, Ser, Arg, or U(X);
[0515] aa₁₃ is absent or Tyr, Gln, Cit, or U(X);
[0516] aa₁₄ is absent or Len, Met, Nle, or U(X);
[0517] aa₁₅ is absent or Asp, Glu, or U(X);
[0518] aa₁₆ is absent or Ser, Gly, Glu, Ala, Aib, Ac5c, Lys, Arg, or U(X);
[0519] aa₁₇ is absent or Arg, hArg, Gln, Glu, Lys, Cit, Aib, Ac4c, Ac5c, or U(X);
[0520] aa₁₈ is absent or Arg, hArg, Ala, Aib, Ac4c, Ac5c, or U(X);
[0521] aa₁₉ is absent or Ala, Val, Aib, Ac4c, Ac5c, or U(X);
[0522] aa₂₀ is absent or Gln, Lys, Arg, Cit, Glu, Aib, Ac-4c, Ac5c, or UT(X);
[0523] aa₂₁ is absent or Asp, Glu, Leu, Aib, Ac4c, Ac5c, or U(X);
[0524] aa₂₂ is absent or Phe, Trp, Nal2, Aib, Ac4c, Ac5c, or U(X);
[0525] aa₂₃ is absent or Val, lie, Aib, Ac4c, Ac5c, or U(X);
[0526] aa₂₄ is absent or Ala, Gln, Glu, Cit, or U(X);
[0527] aa₂₅; is absent or Trp, Nal2, or U(X);
[0528] aa₂₆ is absent or Len, or U(X);
[0529] aa₂₇ is absent or Met, Val, Leu, Nle, Lys, or U1(X);
[0530] aa₂₈ is absent or Asn, Lys, Gln, or U(X);
[0531] aa₂₉ is absent or Thr, Gly, Aib, Ac4c, Ac5c, or U(X);
[0532] wherein any two of aa₁-aa₂₉ are optionally cyclized through their side chains to form a lactam linkage; and
[0533] provided that one, or at least one of aais, aa₁₁, aa₁₂, aa₁₆, aa₁₇, aais, aa₁₉, aa₂₁, aa₂t, aa₂₂, aa₂₃ aa₂₄, aa₂₅, aa₂₆, aa₂₇, aa₂₈ or aa₂₉ is the natural or unnatural amino acid U covalently attached to X.

[0534] In some embodiments, the peptide product of Formula I-A has the structure of Formula III-A

Formula III-A
(SEQ. ID. NO. 1110)
aa₁-aa₂-aa₃-aa₄-aa₅-aa₆-aa₇-aa₈-aa₉-aa₁₀-aa₁₁-
aa₁₂-aa₁₃-aa₁₄-aa₁₅-aa₁₆-aa₁₇-aa₁₈-aa₁₉-aa₂₀-
aa₂₁-aa₂₂-aa₂₃-aa₂₄-aa₂₅-aa₂₆-aa₂₇-aa₂₈-aa₂₉-Z

[0535] wherein:
[0536] Z is 01-1, or —NH—R³, wherein R³ is H, or C₁-C₁₂ substituted or unsubstituted alkyl, or a
[0537] PEG chain of less than 10 Da;
[0538] aa₁ is His;
[0539] aa₂ is Aib:
[0540] aa₃ is Gln;
[0541] aa₄ is Gly;
[0542] aa₅ is Thr;
[0543] aa₆ is Phe;
[0544] aa₇ is Thr;
[0545] aa₈ is Ser;
[0546] aa₉ is Asp;
[0547] aa₁₀ is Tyr, Glu, Lys, or U(X);
[0548] aa₁₁ is Ser:
[0549] aa₁₂ is Lys or Glu;
[0550] aa₁₃ is Tyr;
[0551] aa₁₄ is Leu, Glu, or Lys;
[0552] aa₁₅ is Asp;
[0553] aa₁₆ is Glu or Lys;
[0554] aa₁₇ is Gln, Glu, or U(X);
[0555] aa₁₈ is Ala;
[0556] aa₁₉ is Ala;
[0557] aa₂₀ is Lys, Glu or U(X);
[0558] aa₂₁ is Glu;
[0559] aa₂₂ Phe;
[0560] aa₂₃ is Ile;
[0561] aa₂₄ is Gln, Glu, or U(X);
[0562] aa₂₅ is Trp;
[0563] aa₂₆ is Leu;
[0564] aa₂₇ is Len;
[0565] aa₂₈ is Glu or Gln;
[0566] aa₂₉ is Thr;
[0567] wherein aa₁₆ and aa₂₀, or aa₁₀ and aa₁₄, or aa₁₂ and aa₁₆ are optionally cyclized through their side chains to form a lactam linkage; and
[0568] provided that one, or at least one of aa₁₀, aa₁₇, aa₂₀, or aa₂₄ is the natural or unnatural amino acid U covalently attached to X.

[0569] In some embodiments, a peptide product described herein has the structure of Formula III-B:

Formula III-B
(SEQ. ID. NO. 3)
His₁-aa₂-aa₃-Gly₄-Thr₅-aa₆-Thr₇-Ser₈-Asp₉-aa₁₀-
aa₁₁-aa₁₂-aa₁₃-aa₁₄-aa₁₅-aa₁₆-aa₁₇-aa₁₈-aa₁₉-
aa₂₀-aa₂₁-aa₂₂-aa₂₃-aa₂₄-aa₂₅-aa₂₆-aa₂₇-aa₂₈-aa₂₉-
aa₃₀-Z

[0570] wherein:
   [0571] Z is OH, or —NH—R³, wherein R³ is H or substituted or unsubstituted C₁-C₁₂ alkyl; or a PEG chain of less than 10 Da;
      [0572] aa₂ is Gly, MePro or Aib;
      [0573] aa; is Gln or Cit;
      [0574] aa₆ is Phe, 2FPhe, MePhe, 2FMePhe, or Nal2;
      [0575] aa₁₀ is Tyr, Nal2, Bip, Bip2EtMeO or UJ(X);
      [0576] aa₁₁ is absent or Ser, Asn, Bip or U(X);
      [0577] aa₁₂ is absent or Lys, Glu, Ser or U(X);
      [0578] aa₁₃ is absent or Tyr, Gln, Cit, or U(X);
      [0579] aa₁₄ is absent or Leu, Nle, or U(X);
      [0580] aa₁₅ is absent or Asp, Glu, or U(X);
      [0581] aa₁₆ is absent or Ser, Gly, Glu, Ala, Aib, Lys, Arg, or U(X);
      [0582] aa₁₇ is absent or Arg, hArg, Gln, Glu, Lys, Cit, Aib, or U(X);
      [0583] aa₁₈ is absent or Arg, hArg, Ala, Aib, Ac4c, Ac5c, or U(X);
      [0584] aa₁₉ is absent or Ala, Aib, or U(X);
      [0585] aa₂₀ is absent or Gln. Lys, Arg, Cit, Glu, Aib, or U(X);
      [0586] aa₂₁ is absent or Asp, Glu, Leu, Aib, or U(X):
      [0587] aa₂₂ is absent or Phe, or U(X)
      [0588] aa₂₃ is absent or Val, Tle, Aib or U(X);
      [0589] aa₂₄ is absent or Ala, Gln or U1(X);
      [0590] aa₂₅ is absent or Trp or 1U(X);
      [0591] aa₂₆ is absent or Leu or U(X);
      [0592] aa₂₇ is absent or Met, Val, Len, Nle, Lys or U(X);
      [0593] aa₂₈ is absent or Asn, Gln, Cit, or U(X);
      [0594] aa₂₉ is absent or Thr, Aib, or U(X);
      [0595] aa₃₀ is absent or Arg, or UT(X);
[0596] wherein any two of aa₁-aa₂₃ are optionally cyclized through their side chains to form a lactam linkage; and
[0597] provided that one, or at least one of aa₁₀, aa₁₁, aa₁₂, aa₁₆, aa₁₇, aa₁₈, aa₁₉, aa₂₀, aa₂₁, aa₂₂, aa₂₃, aa₂₄, or aa₂₅ is the natural or unnatural amino acid U covalently attached to X.

[0598] In some specific embodiments of Formula III-A and Formula III-B. X has the structure:

[chemical structure]

[0599] wherein:
   [0600] R^{1a} is a substituted or unsubstituted C₁-C₃₀ alkyl group;
   [0601] R^{1b}, R^{1c} and R^{1d} are H;
   [0602] W¹ is —(C═O)—NH—;
   [0603] W² is —O—; and
   [0604] R² is a bond

[0605] In some of the embodiments described above, R^{1a} is a C₁-C₂₀ alkyl group, a C₈-C₂₀ alkyl group, C₁₂₋₁₈ alkyl group or C₁₄-C₁₈ alkyl group.

[0606] In some embodiments of Formula III-B, U is any linker amino acid described herein. Table 1 in FIG. 1, Table 2, in FIG. 2, and Table 3 in FIG. 3 illustrate certain examples of peptides that covalently linked with surfactants as described herein.

[0607] In some embodiments of Formula I-A, III-A, or ITT-B, the peptide product has the structure:

(SEQ. ID. NO. 795)
His₁-aa₂-Gln₃-Gly₄-Thr₅-Phe₆-Thr₇-Ser₈-Asp₉-Tyr₁₀-
Ser₁₁-Lys₁₂-Tyr₁₃-Leu₁₄-Asp₁₅-Glu₁₆-U(X)₁₇-Ala₁₈-
Ala₁₉-Lys₂₀-Glu₂₁-Phe₂₂-Ile₂₃-Gln₂₄-Trp₂₅-Leu₂₆-
Leu₂₇-aa₂₈-Thr₂₉-NH₂;

[0608] wherein
[0609] aa₂ is Gly or Aib;
[0610] aa₂s is Asn or Gln.

[0611] In some embodiments of Formula I-A, II-A, or III-B, the peptide product has the stricture:

(SEQ. ID. NO. 796)
His₁-Aib₂-Gln₃-Gly₄-Thr₅-Phe₆-Thr₇-Ser₈-Asp₉-
Tyr₁₀-Ser₁₁-Lys₁₂-Tyr₁₃-Leu₁₄-Asp₁₅-aa₁₆-Gln₁₇
Ala₁₈-Ala₁₉-aa₂₀-Glu₂₁-Phe₂₂-Ile₂₃-Lys(N-omega-
X)₂₄-Trp₂₅-Leu₂₆-Leu₂₇-aa₂₈-Thr₂₉-NH₂;

[0612] wherein
[0613] aa₁₆ and aa₂₀ a are each individually either Lys or Glu and are cyclized through their side chains to form a lactam linkage;
[0614] and aa₂₈ is Asn or Gln;
[0615] X comprises a glucuronyl class moiety prepared from 1-alkyl beta-D-glucosides, 1-alkyl beta-D-maltosides, 1-alkyl beta-D-melibiosides, or the corresponding alpha glycosides, and the like, and where alkyl is a CS—C_{2A} linear alkyl chain.

[0616] In some embodiments of Formula I-A, III-A, or III-B, the peptide product has the structure:

(SEQ. ID. NO. 797)
His₁-Aib₂-Gln₃-Gly₄-Thr₅-Phe₆-Thr₇-Ser₈-Asp₉-
Tyr₁₀-Ser₁₁-Lys₁₂-Tyr₁₃-Leu₁₄-Asp₁₅-Glu*₁₆-Gln₁₇
Ala₁₈-Ala₁₉-Lys*₂₀-Glu₂₁-Phe₂₂-Ile₂₃-Lys(N-omega-
X)₂₄-Trp₂₅-Leu₂₆-Leu₂₇-Gln₂₈-Thr₂₉-NH₂;

[0617] wherein
[0618] aa₁₆ and aa₂₀ are cyclized through their side chains to form a lactam linkage;
[0619] and X comprises a glucuronyl class moiety prepared from 1-alkyl beta-D-glucosides, 1-alkyl beta-D-maltosides, 1-alkyl beta-D-melibiosides, or the corresponding alpha glycosides, and the like, and where alkyl is a C₈-C_{2I} linear alkyl chain.

[0620] In some embodiments of Formula I-A, III-A, or III-B, the peptide product has the structure:

(SEQ. ID. NO. 601)
His₁-Aib₂-Gln₃-Gly₄-Thr₅-Phe₆-Thr₇-Ser₈-Asp₉-
Tyr₁₀-Ser₁₁-Lys₁₂-Tyr₁₃-Leu₁₄-Asp₁₅-Glu*₁₆-Gln₁₇
Ala₁₈-Ala₁₉-Lys*₂₀-Glu₂₁-Phe₂₂-Ile₂₃-Lys(N-
omega(1-dodecyl beta-D-glucuronyl))₂₄-Trp₂₅-
Leu₂₆-Leu₂₇-Gln₂₈-Thr₂₉-NH₂;

[0621] wherein
[0622] Glu*₁₆ and Lys*₂₀ are cyclized through their side chains to form a lactam linkage.

[0623] In some embodiments of Formula I-A, III-A, or III-B, the peptide product has the structure:

(SEQ. ID. NO. 602)
His₁-Aib₂-Gln₃-Gly₄-Thr₅-Phe₆-Thr₇-Ser₈-Asp₉-
Tyr₁₀-Ser₁₁-Lys₁₂-Tyr₁₃-Leu₁₄-Asp₁₅-Glu*₁₆-Gln₁₇
Ala₁₈-Ala₁₉-Lys*₂₀-Glu₂₁-Phe₂₂-Ile₂₃-Lys(N-
omega(1-tetradecyl beta-D-glucuronyl))₂₄-Trp₂₅-
Leu₂₆-Leu₂₇-Gln₂₈-Thr₂₉-NH₂;

[0624] wherein
[0625] Lys*₁₆ and Lys*₂₀ are cyclized through their side chains to form a lactam linkage.

[0626] In some embodiments of Formula I-A, III-A, or III-B, the peptide product has the structure:

(SEQ. ID. NO. 603)
His₁-Aib₂-Gln₃-Gly₄-Thr₅-Phe₆-Thr₇-Ser₈-Asp₉-
Tyr₁₀-Ser₁₁-Lys₁₂-Tyr₁₃-Leu₁₄-Asp₁₅-Glu*₁₆-Gln₁₇
Ala₁₈-Ala₁₉-Lys*₂₀-Glu₂₁-Phe₂₂-Ile₂₃-Lys(N-
omega(1-hexadecyl beta-D-glucuronyl))₂₄-Trp₂₅-
Leu₂₆-Leu₂₇-Gln₂₈-Thr₂₉-NH₂;

[0627] wherein
[0628] Glu₁₆ and Lys*₂₀ are cyclized through their side chains to form a lactam linkage.

[0629] In some embodiments of Formula I-A, II-A, or III-B, the peptide product has the structure:

(SEQ. ID. NO. 604)
His₁-Aib₂-Gln₃-Gly₄-Thr₅-Phe₆-Thr₇-Ser₈-Asp₉-
Tyr₁₀-Ser₁₁-Lys₁₂-Tyr₁₃-Leu₁₄-Asp₁₅-Glu*₁₆-Gln₁₇
Ala₁₈-Ala₁₉-Lys*₂₀-Glu₂₁-Phe₂₂-Ile₂₃-Lys(N-
omega(1-octadecyl beta-D-glucuronyl))₂₄-Trp₂₅-
Leu₂₆-Leu₂₇-Gln₂₈-Thr₂₉-NH₂;.

[0630] wherein
[0631] Glu₁₆ and Lys*₂₀ are cyclized through their side chains to form a lactam linkage.

[0632] In some embodiments of Formula I-A, II-A, or III-B, the peptide product has the structure: His₁-Aib₂-Gln₃-Gly₁-Thr₇-Phe-Thr₂-Ser₈-Asp₉-Tyr-Sern -Lys₁₂-Tyr₁₃-Leu₄-Asp₁₅-Glu*₁₆-Gln₁₇ Ala₁₈-Ala₁₉-1Lys*₂₀-Glu₂₁-Phe₂₂-Ile23-Lys(N-omega(I-octyl beta-D-melibiouronyl))₂₄-Trp₂₅-Leu₂₆-Leu₂₇-Gln₂₈-Thr₂₉-NH₂; (SEQ. ID. NO. 630).

[0633] In some embodiments of Formula l-A, III-A, or III-B, the peptide product has the structure: His₁-Aib₂-Gln₃-GlyT₄-hrs-Phe₆-Thr₇-Ser₈-Asp₉-Tyr₁₀-Ser₁₁-Lys₁₂-Tyr₁₃-Leu₁₄-Asp15-Glu*₁₆-Gln₁₇ Ala₁₈-Aia₁₉-Lys*₂₀-Glu₂₁-Phe₂₂-Ile₂₃-Lys(N-onmega(1-dodecyl beta-D-melibiouronyl))₂₄-Trp₂₅-Leu₂₆-Leu₂₇-Gn₂₈-Thr₂₉-N₁₂; (SEQ. ID. NO. 631).

[0634] In some embodiments of Formula I-A, III-A, or 1I-B, the peptide product has the structure: His₁-Aib₂-Gln₃-Gly₄-Thr₅-Phe₆-Thr₇-Ser₈-Asp₉-Tyr₁₀-Ser₁₁-Lys₁₂-Tyr₁₃-Leu₁₄-Asp₁₅-Glu*₁₆-Gln₁₇ Ala₁₈-Ala₁₉-Lys*₂₀-Glu₂₁Phe₂₂-Ile₂₃-Lys(N-omega(1-tetradecyl beta-D-melibiouronyl)₂₄-Trp₂₅-Leu₂₆-Leu₂₇-Gln₂₈-Thr₂₉-NH₂; (SEQ. ID. NO. 632).

[0635] In some embodiments of Formula I-A, III-A, or III-B, the peptide product has the structure: His₁-Aib₂-Gln₃-Gly₄-Thr₅-Phe₆-Thr₇-Ser₈-Asp₉-Tyr₁₀-Ser₁₁-Lys₁₂-Tyr₁₃-Leu₁₄-Asp₁₅-Glu*₁₆-Gln₁₇-Ala₁₈-Ala₁₉-Lys*₂₀-Glu₂₁-Phe₂₂-Ile₂₃-His(N-omega(1-hexadecyl beta-I-melibiouronyl))₂₄-Trp₂₅-Leu₂₆-Leu₂₇-Gln₂₈-Thr₂-N₁₂; (SEQ. ID. NO. 633).

[0636] In some embodiments of Formula I-A, III-A, or III-B, the peptide product has the structure: His₁-Aib₂-Gln₃-Gly₄-Thr₅-Phe₆-Thr₇-Ser₈-Asp₉-Tyr₁₀-Ser₁₁-Lys₁₂-Tyr₁₃-Leu₁₄-Asp₁₅-Glu*₁₆-Gln₁₇ Ala₁₈-Ala₁₉-Lys*₂₀-Glu₂₁-Phe₂₂-Ile₂₃-Lys(N-omega(1-octadecyl beta-D-melibiouronyl))₂₄-Trp₂₅-Leu₂₆-Leu₂₇-Gln₂₈-Thr₂₉-NH₂; (SEQ. ID. NO. 634).

[0637] In some embodiments of Formula I-A, III-A, or III-B, the peptide product has the structure: His₁-Aib₂-Gln₃-Gly₄-Thr₅-Phe₆-Thr₇-Ser₈-Asp₉-Tyr₁₀-Ser₁₁-Lys₁₂-Tyr₁₃-Leu₁₄-Asp₁₅-Glu*₁₆-Gln₁₇, Ala₁₈-Ala₁₉-Lys*₂₀-Glu₂₁-Phe₂₂-Ile₂₃-Lys(N-omega(1-hexadecyl alpha-D-melibiouronyl))₂₄-Trp₂₅-Leu₂₆-Leu₂₇-Gln₂₈-Thr₂-N₁₂; (SEQ. ID. NO. 805).

[0638] In some embodiments of Formula I-A, II-A, or III-B, the peptide product has the structure: His₁-Aib₂-Gln₃-Gly₄-Thr₅-Phe₆-Thr₇-Ser₈-Asp₉-Tyr₁₀-Ser₁₁-Lys₁₂-Tyr₁₃-Le₁₄-Asp₁₅-Glu*₁₆-Lys(N-omega(I-tetradecyl alpha-D-melibiouronyl))₁₇ Ala₁₈-Ala₁₉-Lys*₂₉-Glu₂₁-Phe₂₂-Ile₂₃-Gln₂₄-Trp₂₅-Leu₂₆-Lys₂₇-Gln₂₈-Thr₂₉-NH₂; (SEQ. ID. NO, 819).

[0639] In some embodiments of Formula I-A, ff1-A, or III-B, the peptide product has the structure: His₁-Ala₂-Gln₃-Gly₄-Thr₅-Phe₆-Thr₇-Ser₈-Asp₉-Tyr₁₀-Ser₁₁-Lys₁₂-Tyr₁₃-Leu₁₄-Asp₁₅-Glu*₁₆-Lys(N-omega(I-hexadecyl alpha-D-meibiouronyl))₇₇ Ala₁₈-Ala₁₉-Lys*₂₀-Glu₂₁-Phe₂₂-Ile₂₃-Gln₂₄-Trp₂₅-Leu₂₆-Leu₂₇-Gln₂₈-Thr₂₉-NH₂; (SEQ. ID. NO. 820).

[0640] In some embodiments of Formula I-A, II-A, or III-B, the peptide product has the structure:

[0641] In some embodiments of Formula I-A, III-A, or III-B, the peptide product has the structure: His₁-Aib₂-Gln₃-Gly₄-Thr₅-Phe₆-Thr₇-Ser₈-Asp₉-Tyr₁₀-Ser₁₁-Lys₁₂-Tyr₁₃-Leu₁₄-Asp₁₅-Glu*₁₆Lys(N-omega(1-octadecyl alpha-D-melibiouronyl))₁₇ Ala₁₈-Ala₁₉-Lys*₂₀-Glu₂₁-Phe₂₂-Ile₂₃-Gln₂₄-Trp₂₅-Leu₂₆-Leu₂₇-Gln₂₈-Thr₂₉-NH₂; (SEQ. ID. NO. 821).

[0642] In some embodiments of Formula I-A, II-A, or III-B, the peptide product has the structure: His: Aib₂-Gln₃-Gly₄-Thr₅-Phe₆-Thr₇-Ser₈-Asp₉-Tyr₁₀-Ser₁₁-Lys₁₂-Tyr₁₃-Leu₁₄-Asp₁₅-Glu*₁₆-Lys(N-omega(1-dodecyl alpha-D-melibiouronyl))i, Ala₁₈-Ala₁₉-Lys*₂₉-Glu₂-Phe₂₂-Ile₂₃-Lys(N-omega(1-dodecyl beta-D-glucouronyl)₂₄-Trp₂₅-Leu₂₆-Leu₂₇-Gln₂₈-Thr₂₉-NH₂; (SEQ. ID. NO. 1114).

[0643] In some embodiments of Formula I-A, III-A, or III-B, the peptide product has the structure: 1His₁-Aib₂-Glu₃-Gly₄-Thr₅-Phe₆-Thr₇-Ser₈-Asp₉-Tyr₁₀-Ser₁₁-Lys₁₂-Tyr₃-Le₁e4-Asp₁₅-Glu*₁₆-Lys(N-omega(I-tetradecyl alpha-D-melibiouronyl))₁₇ Ala₁₈-Ala₁₉-Lys*₂₀-Glu₂₁-Phe₂₂-Ile₂₃-Lys(N-omega(0.1-tetradecyl beta-D-iucouronyl))₂r-Trp₂₅-Leu₂₆-Leu₂r-Gln s-Tlr₂₉-N1H.; (SEQ. ID. NO. 1115).

[0644] In some embodiments of Formula I-A, III-A, or III-B, the peptide product has the structure: His₁-Aib₂-Gln₃-Gly₄-Thr₅-Phe₆-Thr₇-Ser₈-Asp₉-Tyr₁₀-Ser₁₁-Lys₁₂-Tyr₁₃-Leu₁₄-Asp₁₅-Glu*₁₆-Lys(N-omega(1-hexadecyl alpha-D-melibiouronyl))₁₇Ala₁₈-Ala₁₉-Lys*₂₀-Glu₂₁-Phe₂₂-Ile₂₃-Lys(N-omega(1-hexadecyl beta-D-glucouronyl))₂-Trp₂₅-Leu₂₆-Leu₂₇-Gln₂₈-Thr₂₉-NH₂; (SEQ. ID. NO. 1116).

[0645] In some embodiments of Formula I-A, II-A, or III-B, the peptide product has the structure: His₁-Aib₂-Gln₃-Gly₄-Thr₅-Phe₆-Thr₇-Ser₈-Asp₉-Tyr₁₀-Ser₁₁-Lys₁₂-Tyr₁₃-Leu₁₄-Asp₁₅-Glu*₁₆-Lys(N-omega(1-(13-carboxyl-tridecyloxy) beta-D-glucuronyl))₁₇ Ala₁₈-Ala₁₉-Lys*₂₀-Glu₂₁-Phe₂₂-Ile₂₃-Gln₂₄-Trp₂-Leuz-Leu₂₇-Gln₂₈-Thr₂₉-NH₂; (SEQ. ID. NO. 1117).

[0646] In some embodiments of Formula I-A, III-A, or III-B, the peptide product has the structure: His₁-Aib₂-Gln₃-Gly₄-Thr₅-Phe₆-Thr₇-Ser₈-A sp₉-Tyr₁₀-Ser₁₁-Lys₁₂-Tyr₁₃-Leu₁₄-Asp₁₅-Glu*₁₆-Lys(N-omega(1-(15-carboxyl-1-pentadecyloxy) beta-D-glucuronyl))₁₇ Ala₁₈-Ala₁₉-Lys*₂₀-Glu₂₁-Phe₂₂-lIle₂₃-Glnz₂₄-Trp₂₅-Leu₂₆-Leu₂₇-Gln₂₈-Thr₂₉-N₁; (SEQ. ID. NO. 1118).

[0647] In some embodiments of Formula I-A, III-A, or III-B, the peptide product has the structure: His₁-Aib₂-Gln₃-Gly₄-Thr₅-Phe₆-Thr₇-Ser₈-Asp₉-Tyr₁₀-Ser₁₁-Lys₁₂-Tyr₁₃-Leu₁₄-Asp₁₅-Glu*₁₆-Lys(N-omega(1-(17-carboxyl-heptadecyloxy) beta-D-glucuronyl))₁₇ Ala₁₈-Ala₁₉-Lys*₂₀*-Glu₂₁-Phe₂₂-Ile₂₃-Gln₂₄-Trp₂₅-Leu₂₆-Leu₂₇-Gln₂₈-Thr₂₉-N-₂; (SEQ. ID. NO. 1119).

[0648] In some embodiments of Formula I-A, III-A, or III-B, the peptide product has the structure: His₁-Aib₂-Gln₃-Gly₄-Thr₅-Phe₆-Thr₇-Ser₈-Asp₉-Tyr₁₀-Ser₁₁-Lys₁₂-Tyr₁₃-Leu₁₄-Asp₁₅-Glu*₁₆-Gln₁₇ Ala₁₈-Ala₁₉-Lys*₂₀-Glu₂₁-Phe₂₂-Ile₂₃-Lys(N-omega(1-(13-carboxyl-tridecyloxy) beta-D-glucuronyl))₂₄-Trp₂₅-Leu₂₆-Leu₂₇-Gln₂₈-Thr₂₉-NH₂; (SEQ. ID. NO. 1120).

[0649] In some embodiments of Formula I-A, III-A, or III-B, the peptide product has the structure: His₁-Aib₂-Gln₃-Gly₄-Thr₅-Phe₆-Thr₇-Ser₈-Asp₉-Tyr₁₀-Ser₁₁-Lys₁₂-Tyr₁₃-Leu₁₄-Asp₁₅-Glut*₁₆-Gln₁₇-Ala₁₈-Ala₁₉-Lys*₂₀-Glu₂₁-Phe₂₂-IPe₂₃-Lys(N-omega(1-(15-carboxyl-pentadecyloxy) beta-D-glucuronyl))₂-Trp₂-Leu -Leu₂₇-Gns-Thr₂₉-N1H₂; (SEQ. ID. NO. 1121).

[0650] In some embodiments of Formula I-A, III-A, or III-B, the peptide product has the structure: His₁-Aib₂-Gln₃-Gly₄-Thr₅-Phe₆-Thr₇-Ser₈-Asp₉-Tyr₁₀-Ser-Lys₁₂-Tyr₁₃-Leu₁₄-Asp₁₅-Glu*₁₆-Gln₁₇-Ala₁₈-Ala₁₉-Lys*₂₀-Glu₂₁-Phe₂₂-Ile₂₃-Lys(N-omega(i-(17-carboxyl-heptadecyloxy) beta-D-glucuronyl))₂₄-Trp₂₅-Leu₂₆-Leu₂₇-Gln₂₈-Thr₂₉-N—; (SEQ. ID. NO. 1122).

[0651] Contemplated within the scope of embodiments presented herein are peptide products of Formula I-A, Formula III-A, or Formula III-B, wherein the peptide product comprises one, or, more than one surfactant groups (e.g., group X having the structure of Formula I). In one embodiment, a peptide product of Formula I-A, Formula III-A, or Formula III-B, comprises one surfactant group. In another embodiment, a peptide product of Formula I-A, Formula III-A, or Formula III-B, comprises two surfactant groups. In yet another embodiment, a peptide product of Formula I-A, Formula III-A, or Formula III-B, comprises three surfactant groups.

[0652] Recognized herein is the importance of certain portions of SEQ. ID. NO. 1 or 1108 for the treatment of conditions associated with insulin resistance and/or cardiovascular conditions. Accordingly, provided herein is a method of treating diabetes in an individual in need thereof comprising administration of a therapeutically effective amount of a glucagon analog comprising amino acid residues aa₁-aa₁₇ of SEQ. ID. NO. 1 or 1108 to the individual in need thereof.

[0653] In a further embodiment, provided herein is a method of treating diabetes in an individual in need thereof comprising administration of a therapeutically effective amount of a glucagon analog comprising amino acid residues aa₁-aa₁₈ of SEQ. ID. NO. 1 or 1108 to the individual in need thereof.

[0654] In another embodiment, provided herein is a method of treating diabetes in an individual in need thereof comprising administration of a therapeutically effective amount of a glucagon analog comprising amino acid residues aa₁-aa₁₉ of SEQ. ID. NO. 1 or 1108 to the individual in need thereof.

[0655] In another embodiment, provided herein is a method of treating diabetes in an individual in need thereof comprising administration of a therapeutically effective amount of a glucagon analog comprising amino acid residues aa₁-aa₂₀ of SEQ. ID. NO. 1 or 1108 to the individual in need thereof.

[0656] In an additional embodiment, the administration of the said glucagon analog described above causes weight loss.

[0657] Recognized herein is the importance of certain portions of SEQ. ID. NO. 1 or 1108 for the treatment of conditions associated with insulin resistance and/or cardiovascular conditions. Accordingly, provided herein is a method of treating diabetes in an individual in need thereof comprising administration of a therapeutically effective amount of a glucagon analog comprising amino acid residues aa₁-aa₁₇ of SEQ. ID. NO. 1 or 1108 to the individual in need thereof.

[0658] In a further embodiment, provided herein is a method of treating diabetes in art individual in need thereof comprising administration of a therapeutically effective amount of a glucagon analog comprising amino acid residues aa-aa₁ₛ of SEQ. ID. NO. 1 or 1108 to the individual in need thereof.

[0659] In another embodiment, provided herein is a method of treating diabetes in an individual in need thereof comprising administration of a therapeutically effective amount of a glucagon analog comprising amino acid residues aa₁-aa₁₉ of SEQ. ID. NO. 1 or 1108 to the individual in need thereof.

[0660] In another embodiment, provided herein is a method of treating diabetes in an individual in need thereof comprising administration of a therapeutically effective amount of a glucagon analog comprising amino acid residues aa₁-aa₂₀ of SEQ. ID. NO. 1 or 1108 to the individual in need thereof.

[0661] In an additional embodiment, the administration of the said glucagon analog described above causes weight loss.

[0662] In any of the embodiments described above, the said glucagon analog is modified with a surfactant X of Formula I:

[chemical structure]

[0663] wherein
   [0664] R^{1a} is independently, at each occurrence, a bond, H, a saccharide, a substituted or unsubstituted C₁-C₃₀ alkyl group, a substituted or unsubstituted alkoxyaryl group, a substituted or unsubstituted aralkyl group, or a steroid nucleus containing moiety;
   [0665] R^{1b}, R^{1c} and R^{1d} are each, independently at each occurrence, a bond, H, a substituted or unsubstituted C1-C₃₀ alkyl group, a substituted or unsubstituted alkoxyaryl group, or a substituted or unsubstituted aralkyl group;
   [0666] W¹ is independently, at each occurrence, —CH₂—, —CH₂—O—, —(C═O), —(C═O)—O—, —(C═O)—NH—, —(C═S)—, —(C═S)—NH—, or —CH—S—;
   [0667] W² is —O—, —CH₂— or —S—;
   [0668] R² is independently, at each occurrence, a bond to U, H, a substituted or unsubstituted C₁-C₃, alkyl group, a substituted or unsubstituted alkoxyaryl group, or a substituted or unsubstituted aralkyl group, —NH, —S—, -triazolo-, —NH(C═O)—CH₂—, —(CH₂)ₘ-maleimide-;
   [0669] n is 1, 2 or 3; and
   [0670] m is an integer of 1-10.

[0671] In a specific embodiment, the said glucagon analog is modified with a surfactant, X having the structure:

[chemical structure]

[0672] wherein:
   [0673] R^{1a} is a substituted or unsubstituted C₁-C₃₀ alkyl group;
   [0674] R^{1b}, R^{1c} and R^{1d} are H;
   [0675] W¹ is —(C═O)—NH—;
   [0676] W² is —O—; and
   [0677] R² is a bond

[0678] In some of the embodiments described above, R^{1a} is a C₁-C₃₀ alkyl group, a C₈-C₂₀, alkyl group, C₁₂-C₁₈ alkyl group or C₁₄-C₁₈ alkyl group.

[0679] In some embodiments, R² is independently, at each occurrence, a bond, H, a leaving group, a protecting group, or a reversibly protected natural or unnatural amino acid. In some embodiments, R² is independently, at each occurrence, a bond. In some embodiments, R² is independently, at each occurrence, H. In some embodiments, R² is independently, at each occurrence, a leaving group. In some embodiments, R² is independently, at each occurrence, a protecting group. In some embodiments, R² is independently, at each occurrence, a reversibly protected natural or unnatural amino acid. In some embodiments, R² is independently, at each occurrence, a substituted or unsubstituted C₁-C₃₀ alkyl group. In some embodiments, R² is independently, at each occurrence, a substituted or unsubstituted alkoxyaryl group. In some embodiments, R² is independently, at each occurrence, a substituted or unsubstituted aralkyl group. In some embodiments, R² is independently, at each occurrence, —NH—. In some embodiments, R² is independently, at each occurrence, —S—. In some embodiments, R² is independently, at each occurrence, -triazolo-. In some embodiments, R² is independently, at each occurrence, —NH—(C═O)—CH₂—. In some embodiments, R² is independently, at each occurrence, —(CH₂)ₘ-maleimide-.

[0680] In some embodiments described above and herein, R is a saccharide. In some embodiments, the saccharide is a galactose. In certain embodiments, the saccharide is an alpha-linked galactose. In other embodiments, the saccharide is alpha-linked galactopyranose, beta-linked galactopyranose, alpha-linked galactofuranose, or beta-linked galactofuranose.

[0681] As used herein, the term diabetes includes both Type 1 and Type 2 diabetes. Accordingly, in some embodiments the methods described herein comprise administration of any compound described herein including compounds of Formula II, III-A, and/or II-B, and/or compounds described in Table 1 of FIG. 1, Table 2 of FIG. 2, and Table 3 of FIG. 3 to an individual suffering from Type 1 diabetes. In some other embodiments, the methods described herein comprise administration of any compound described herein including compounds of Formula II, l-A, and/or III-B, and/or compounds described in Table 1 of FIG. 1, Table 2 of FIG. 2, and Table 3 of FIG. 3 to an individual suffering from Type 2 diabetes.

[0682] Also provided herein is a method of treating a cardiovascular disease in an individual in need thereof comprising administration of a therapeutically effective amount of a glucagon analog comprising amino acid residues aa₁-aa₁₇ of SEQ. ID. NO. 1 or 1108 to the individual in need thereof.

[0683] Also provided herein is a method of treating a cardiovascular disease in an individual in need thereof comprising administration of a therapeutically effective amount of a glucagon analog comprising amino acid residues aa₁-aa₁₈ of SEQ. ID. NO. 1 or 1108 to the individual in need thereof.

[0684] Also provided herein is a method of treating a cardiovascular disease in an individual in need thereof comprising administration of a therapeutically effective amount of a glucagon analog comprising amino acid residues aa₁-aa₁₉ of SEQ. ID. NO. 1 or 1108 to the individual in need thereof.

[0685] Also provided herein is a method of treating a cardiovascular disease in an individual in need thereof comprising administration of a therapeutically effective amount of a glucagon analog comprising amino acid residues aa₁-aa₂₀ of SEQ. ID. NO. 1 or 1108 to the individual in need thereof.

[0686] In some cases for the embodiments described above, the said glucagon analog is administered when the cardiovascular disease is associated with an isochronic event.

[0687] Also provided herein is a method of treating a cardiovascular disease in an individual in need thereof comprising administration of a therapeutically effective amount of a glucagon analog comprising amino acid residues aa_{A}-aa₁ of SEQ. ID. NO. 1 or 1108 to the individual in need thereof.

[0688] Also provided herein is a method of treating a cardiovascular disease in an individual in need thereof comprising administration of a therapeutically effective amount of a glucagon analog comprising amino acid residues aa₁-aa₁₇ of SEQ. ID. NO. 1 or 1108 to the individual in need thereof.

[0689] Also provided herein is a method of treating a cardiovascular disease in an individual in need thereof comprising administration of a therapeutically effective amount of a glucagon analog comprising amino acid residues aa₁-aa₁) of SEQ. ID. NO. 1 or 1108 to the individual in need thereof.

[0690] Also provided herein is a method of treating a cardiovascular disease in an individual in need thereof comprising administration of a therapeutically effective amount of a glucagon analog comprising amino acid residues aa₁-aa₂₀ of SEQ. ID. NO. 1 or 1108 to the individual in need thereof.

[0691] In some cases for the embodiments described above, the said glucagon analog is administered when the cardiovascular disease is associated with an ischemic event.

[0692] In any of the embodiments described above, the said glucagon analog is modified with a surfactant X of Formula I:

[chemical structure]

[0693] wherein:
   [0694] R^{1a} is independently, at each occurrence, a bond, H, a saccharide, a substituted or unsubstituted C₁-C₃₀ alkyl group, a substituted or unsubstituted alkoxyaryl group, a substituted or unsubstituted aralkyl group, or a steroid nucleus containing moiety;
   [0695] R^{1b}, R^{1c}, and R^{1d} are each, independently at each occurrence, a bond, H, a substituted or unsubstituted C₁-C₃, alkyl group, a substituted or unsubstituted alkoxyaryl group, or a substituted or unsubstituted aralkyl group;
   [0696] W¹ is independently, at each occurrence, —CH₂—, —CH₂—O—, —(C═O), —(C═O)—O—, —(C═O)—NH—, —(C═S)—, —(C═S)—NH—, or —CH₂S—;
   [0697] W² is —O—, —CH₂— or —S—;
   [0698] R² is independently, at each occurrence, a bond to U, H, a substituted or unsubstituted C₁-C_{A} alkyl group, a substituted or unsubstituted alkoxyaryl group, or a substituted or unsubstituted aralkyl group, —NH, —S—, -triazolo-, NH(C═O)—CH₂U—, —(CH₂)ₘ-maleimide-.
   [0699] n is 1, 2 or 3; and
   [0700] m is 1-10.

[0701] In a specific embodiment, the said glucagon analog is modified with a surfactant. X having the structure:

[chemical structure]

[0702] wherein
   [0703] R^{1a} is a substituted or unsubstituted C₁-C₃₀ alkyl group;
   [0704] R^{1b}, R^{1c}, and R^{1d} are H;
   [0705] W¹ is —(C═O)—NH—;
   [0706] W² is —O—; and
   [0707] R² is a bond

[0708] In some of the embodiments described above, R^{1a} is a C₁-C₂₀ alkyl group, a C₈-C₂₀ alkyl group, C₁₂-C₁₈ alkyl group or C₁₄-C₁₈ alkyl group.

[0709] In some embodiments described above and herein, R is a saccharide. In some embodiments, the saccharide is a galactose. In certain embodiments, the saccharide is an alpha-linked galactose. In other embodiments, the saccharide is alpha-linked galactopyranose, beta-linked galactopyranose, alpha-linked galactofuranose, or beta-linked galactofuranose.

[0710] Modifications at the amino or carboxyl terminus may optionally be introduced into the peptides (e.g., glucagon or GLP-1) (Nestor, J. J., Jr. (2009) Current Medicinal Chemistry 16: 4399-44118). For example, the peptides can be truncated or acylated on the N-terminus to yield peptides analogs exhibiting low efficacy, partial agonist and antagonist activity, as has been seen for some peptides (Gourlet, P., et al. (1998) Eur J Pharmacol 354: 105-111, Gozes, L. and Furman, S. (2003) Curr Pharm Des 9: 483-494), the contents of which is incorporated herein by reference). For example, deletion of the first 6 residues of bPTIH yields antagonistic analogs (Mahaffey, J. E., et al. (1979) J Biol Chem 254: 6496-6498; Goldman, M. E., et al. (1988) Endocrinology 123: 2.597-2599) and a similar operation on peptides described herein generates potent antagonistic analogs. Other modifications to the N-terminus of peptides, such as deletions or incorporation of D-amino acids such as D-Phe also can give potent and long acting agonists or antagonists when substituted with the modifications described herein such as long chain alkyl glycosides. Such agonists and antagonists also have commercial utility and are within the scope of contemplated embodiments described herein.

[0711] Also contemplated within the scope of embodiments described herein are surfactants covalently attached to peptide analogs, wherein the native peptide is modified by acetylation, acylation, PEGylation, ADP-ribosylation, amidation, covalent attachment of a lipid or lipid derivative, covalent attachment of phosphotidylinositol, cross-linking, cyclization, disulfide bond formation, demethylation, formation of covalent cross-link formation of cysteine, formation of pyrogiutamate, formylation, gamma-carboxylation, glycosylation, GPI anchor formation, hydroxylation, iodination, methylation, myristoylation, oxidation, proteolytic processing, phosphorylation, prenylation, racemization, glycosylation, lipid attachment, sulfation, gamma-carboxylation of glutamic acid residues, hydroxylation and ADP-ribosylation, selenoylation, sulfation, transfer-RNA mediated addition of amino acids to proteins, such as arginylation, and ubiquitination. See, for instance, (Nestor, J. J., Jr. (2007) Comprehensive Medicinal Chemistry 112: 573-601, Nestor, J.., Jr. (2009) Current Medicinal Chemistry 16: 4399-4418, Creighton, T. E. (1993, Wold, F. (1983) Posttranslational Covalent Modification of Proteins 1-12, Seifter, S. and Englard, S. (1990) Methods Enzymol 182: 626-646, Rattan, S. L, et al. (1992) Ann N Y Acad Sci 663: 48-62). Also contemplated within the scope of embodiments described herein are peptides that are branched or cyclic, with or without branching. Cyclic, branched and branched circular peptides result from post-translational natural processes and are also made by suitable synthetic methods. In some embodiments, any peptide product described herein comprises a peptide analog described above that is then covalently attached to an alkyl-glycoside surfactant moiety.

[0712] Also contemplated within the scope of embodiments presented herein are peptide chains substituted in a suitable position by the substitution of the analogs claimed herein by acylation on a linker amino acid, at for example the s-position of Lys, with fatty acids such as octanoic, decanoic, dodecanoic, tetradecanoic, hexadecanoic, octadecanoic, 3-phenylpropanoic acids and the like, with saturated or unsaturated alkyl chains (Zhang, L. and Bulaj, G. (2012) Curr Med Chem 19: 1602-1618). Similarly, such acylation may be linked to a spacer such as gamma-linked glutamic acid or on a gamma linked glutamic acid further linked to a “mini-PEG” chain such as 9-amino-4,7-dioxanonanoic acid (DiMNlarchi, R. D. and Ward, B. P (2012) US Patent Application US2012/0238493). Non-limiting, illustrative examples of such analogs are:

(SEQ. ID. NO. 785)
His₁-Gly₂-Gln₃-Gly₄-Thr₅-Phe₆-Thr₇-Ser₈-Asp₉-
Tyr₁₀-Ser₁₁-Lys₁₂-Tyr₁₃-Leu₁₄-Asp₁₅-Glu₁₆-Lys(N-
epsilon-dodecanoyl)₁₇-Ala₁₈-Ala₁₉-Lys₂₀-Glu₂₁-
Phe₂₂-Ile₂₃-Ala₂₄-Trp₂₅-Leu₂₆-Leu₂₇-Asn₂₈-Thr₂₉-
NH₂,
(SEQ. ID. NO. 786)
His₁-Gly₂-Gln₃-Gly₄-Thr₅-Phe₆-Thr₇-Ser₈-Asp₉-
Tyr₁₀-Ser₁₁-Lys₁₂-Tyr₁₃-Leu₁₄-Asp₁₅-Glu₁₆-Lys(N-
epsilon-hexadecanoyl)₁₇-Ala₁₈-Ala₁₉-Lys₂₀-Glu₂₁-
Phe₂₂-Ile₂₃-Ala₂₄-Trp₂₅-Leu₂₆-Leu₂₇-Asn₂₈-Thr₂₉-
NH₂,
(SEQ. ID. NO. 787)
His₁-Gly₂-Gln₃-Gly₄-Thr₅-Phe₆-Thr₇-Ser₈-Asp₉-
Tyr₁₀-Ser₁₁-Lys₁₂-Tyr₁₃-Leu₁₄-Asp₁₅-Glu₁₆-Lys(N-
epsilon-octadecanoyl)₁₇-Ala₁₈-Ala₁₉-Lys₂₀-Glu₂₁-
Phe₂₂-Ile₂₃-Ala₂₄-Trp₂₅-Leu₂₆-Leu₂₇-Asn₂₈-Thr₂₉-
NH₂,
(SEQ. ID. NO. 788)
His₁-Aib₂-Gln₃-Gly₄-Thr₅-Phe₆-Thr₇-Ser₈-Asp₉-
Tyr₁₀-Ser₁₁-Lys₁₂-Tyr₁₃-Leu₁₄-Asp₁₅-cyclo(Glu₁₆-
Gln₁₇-Ala₁₈-Ala₁₉-Lys₂₀)-Glu₂₁-Phe₂₂-Ile₂₃-Lys(N-
epsilon-hexadecanoyl)₂₄-Trp₂₅-Leu₂₆-Leu₂₇-Asn₂₈-
Thr₂₉-NH₂,
(SEQ. ID. NO. 789)
His₁-Aib₂-Gln₃-Gly₄-Thr₅-Phe₆-Thr₇-Ser₈-Asp₉-
Tyr₁₀-Ser₁₁-Lys₁₂-Tyr₁₃-Leu₁₄-Asp₁₅-cyclo(Glu₁₆-
Gln₁₇-Ala₁₈-Ala₁₉-Lys₂₀)-Glu₂₁-Phe₂₂-Ile₂₃-Lys(N-
epsilon(N-alpha-octadecanoyl)-gamma-glutamyl)₂₄-
Trp₂₅-Leu₂₆-Leu₂₇-Asn₂₈-Thr₂₉-NH₂,
(SEQ. ID. NO. 790)
His₁-Aib₂-Gln₃-Gly₄-Thr₅-Phe₆-Thr₇-Ser₈-Asp₉-
Tyr₁₀-Ser₁₁-Lys₁₂-Tyr₁₃-Leu₁₄-Asp₁₅-cyclo(Glu₁₆-
Gln₁₇-Ala₁₈-Ala₁₉-Lys₂₀)-Glu₂₁-Phe₂₂-Ile₂₃-Lys(N-
epsilon(N-alpha-hexadecanoyl)-gamma-glutamyl)₂₄-
Trp₂₅-Leu₂₆-Leu₂₇-Asn₂₈-Thr₂₉-NH₂,
(SEQ. ID. NO. 791)
His₁-Aib₂-Gln₃-Gly₄-Thr₅-Phe₆-Thr₇-Ser₈-Asp₉-
Tyr₁₀-Ser₁₁-Lys₁₂-Tyr₁₃-Leu₁₄-Asp₁₅-cyclo(Glu₁₆-
Gln₁₇-Ala₁₈-Ala₁₉-Lys₂₀)-Glu₂₁-Phe₂₂-Ile₂₃-Lys(N-
epsilon-(N-alpha-octadecanoyl(N9-gamma-glutamyl(9-
amino-4,7-dioxanonanoyl))))₂₄-Trp₂₅-Leu₂₆-Leu₂₇-
Asn₂₈-Thr₂₉-NH₂,
(SEQ. ID. NO. 792)
His₁-Aib₂-Gln₃-Gly₄-Thr₅-Phe₆-Thr₇-Ser₈-Asp₉-
Tyr₁₀-Ser₁₁-Lys₁₂-Tyr₁₃-Leu₁₄-Asp₁₅-cyclo(Glu₁₆-
Gln₁₇-Ala₁₈-Ala₁₉-Lys₂₀)-Glu₂₁-Phe₂₂-Ile₂₃-Lys(N-
epsilon(N-alpha-hexadecanoyl(N9-gamma glutamyl(9-
amino-4,7-dioxanonanoyl))))₂₄-Trp₂₅-Leu₂₆-Leu₂₇-
Asn₂₈-Thr₂₉-NH₂,,
and the like.

[0713] In further embodiments, a peptide chain is optionally substituted in a suitable position by reaction on a linker amino acid, for example the sulthydryl of Cys, with a spacer and a hydrophobic moiety such as a steroid nucleus, for example a cholesterol moiety. In some of such embodiments, the modified peptide further comprises one or more PEG chains. Non-limiting examples of such molecules are:

(SEQ. ID. NO. 793)
His₁-Aib₂-Gln₃-Gly₄-Thr₅-Phe₆-Thr₇-Ser₈-Asp₉-Tyr₁₀-
Ser₁₁-Lys₁₂-Tyr₁₃-Leu₁₄-Asp₁₅-cyclo(Glu₁₆-Gln₁₇-Ala₁₈-
Ala₁₉-Lys₂₀)-Glu₂₁-Phe₂₂-Ile₂₃-Cys(S-(3-(PEG4-
aminoethylacetamide-cholesterol))₂₄-Trp₂₅-Leu₂₆-
Leu₂₇-Asn₂₈-Thr₂₉-NH₂,

[0714] His₁-Gly₂-Gln₃-Gly₄-Thr₅-Phe-Thr₇-Ser₈-Asp₉-Tyr₁₀-Ser₁₁-Lys₁₂-Tyr₁₃-Leu₁₄-Asp₁₅-cyclo(Glu₁₆-Gln₁₇-Ala₁₈-Ala₁₉-Lys₂₀)-Glu₂₁-Phe₂₂-Ile₂₃-Cys(S-(3-(PEG4-aminoethylacetamide-Cholesterol))₂₄-Trp₂₅-Leu₂₆-Leu₂₇-Asn₂₈-Thr₂₉-NH₂, (SEQ. ID. NO. 794), and the like.

[0715] Aside from the twenty standard amino acids, there are a vast number of “nonstandard amino acids” or unnatural amino acids that are known to the art and that may be incorporated in the compounds described herein, as described above. Other nonstandard amino acids are modified with reactive side chains for conjugation (Gauthier, M A. and Klok, H. A. (2008) Chem Commun (Camb) 2591-2611; de Graaf, A. J., et al. (2009) Bioconjug Chem 20: 1281-1295). In one approach, an evolved tRNA/tRNA synthetase pair and is coded in the expression plasmid by the amber suppressor codon (Deiters, A, et al (2004). Bio-org. Med. Chem. Lett. 14, 5743-5). For example, p-azidophenylalanine was incorporated into peptides and then reacted with a functionalized surfactant, or a PEG polymer having an acetylene moiety in the presence of a reducing agent and copper ions to facilitate an organic reaction known as “Huisgen [3+2]cycloaddition.” A similar reaction sequence using the reagents described herein containing an acetylene modified alkyl glycoside or PEG modified glycoside will result in PEGylated or alkyl glycoside modified peptides. For peptides of less than about 50 residues, standard solid phase synthesis is used for incorporation of said reactive amino acid residues at the desired position in the chain. Such surfactant-modified peptides and/or proteins offer a different spectrum of pharmacological and medicinal properties than peptides modified by PEG incorporation alone.

[0716] The skilled artisan will appreciate that numerous permutations of the peptide analogs are possible and, provided that an amino acid sequence has an incorporated surfactant moiety, will possess the desirable attributes of surfactant modified peptide products described herein.

### Certain Definitions

[0717] As used in the specification, “a” or “an means one or more. As used in the claim(s), when used in conjunction with the word “comprising,” the words “a” or “an” mean one or more. As used herein, “another” means at least a second or more.

[0718] As used herein, the one- and three-letter abbreviations for the various common amino acids are as recommended in Pure Appl. Chem. 31, 639-645 (1972) and 40, 277-290 (1974) and comply with 37 CFR § 1.822 (55 FR 18245, May 1, 1990). The abbreviations represent L-amino acids unless otherwise designated as D-or DL. Certain amino acids, both natural and non-natural, are achiral, e.g., glycine, Cu-diethylglycine (Deg), a-amino-isobutyric acid (Aib), 1-aminocyclobutane-1-carboxylic acid (Ac4c), I-aminocyclopentane-1-carboxylic acid (Ac5c). 1-aminocyclohexane-1-carboxylic acid (Ac6c). Analogs of glutamine include citrulline (Cit). All peptide sequences are presented with the N-terminal amino acid on the left and the C-terminal amino acid on the right. C-alpha-methylproine (MePro) can be used to constrain the peptide linkage as can C-alpha-methylphenylalanine (MePhe), 2-fluorophenylalanine (2FPhe). C-alpha-methyl-2-fluorophenylalanine (2FMePhe), and C-alpha-methyllysine (MeLys). Additional unnatural aromatic amino acids may be substituted, such as 2-naphthylalanine (Nal2), biphenylalanine (Bip), 2-ethyl-4”-methoxybiphenylalanine (Bip2EtMeO) and may yield potency increases.

[0719] An “alkyl” group refers to an aliphatic hydrocarbon group. Reference to an alkyl group includes “saturated alkyl” and/or “unsaturated alkyl”. The alkyl group, whether saturated or unsaturated, includes branched, straight chain, or cyclic groups. A “substituted” alkyl group is substituted with one or more additional group(s). In certain embodiments, the one or more additional group(s) are individually and independently selected from amide, ester, alkyl, cycloalkyl, heteroalkyl, aryl, heteroaryl, heteroalicyclic, hydroxy, alkoxy, aryloxy, alkylthio, arylthio, alkylsulfoxide, arylsulfoxide, ester, alkylsulfone, arylsulfone, cyano, halogen, alkoyl, alkoyloxo, isocyanato, thiocyanato, isothiocyanato, nitro, haloalkyl, haloalkoxy, fluoroalkyl, amino, alkyl-amino, dialkyl-amino, amido, oxo, hydrophobic natural product such as a steroid, an aralkyl chain (including alkoxyaryl), alkyl chain containing an acyl moiety, or the like. In some embodiments, an alkyl group is linked to the Na-position of a residue (e.g., Tyr or Dint) in a peptide. This class is referred to as N-alkyl and comprises straight or branched alkyl groups from C₁-C₁₀, or an aryl substituted alkyl group such as benzyl, phenylethyl and the like. In some embodiments, an alkyl moiety is a 1-alkyl group that is in glycosidic linkage (typically to the 1-position of, for example, glucose) to the saccharide moiety. Such a 1-alkyl group is a C₁-C₃₀ alkyl group.

[0720] An “aryl” group refers to an aromatic ring wherein each of the atoms forming the ring is a carbon atom. Aryl rings described herein include rings having five, six, seven, eight, nine, or more than nine carbon atoms. Aryl groups are optionally substituted with substituents selected from halogen, alkyl, acyl, alkoxy, alkylthio, sulfonyl, dialkyl-amino, carboxyl esters, cyano or the like. Examples of aryl groups include, but are not limited to phenyl, and naphthalenyl.

[0721] The term “acyl” refers to a C₁-C₂₀ acyl chain. This chain may comprise a linear aliphatic chain, a branched aliphatic chain, a chain containing a cyclic alkyl moiety, a hydrophobic natural product such as a steroid, an aralkyl chain, or an alkyl chain containing an acyl moiety.

[0722] The term “steroid nucleus” refers to the core of steroids comprising an arrangement of four fused rings designated A, B, C and D as shown below:

[chemical structure]

Examples of steroid nucleus containing moieties include, and are not limited to, cholesterol and the like.

[0723] As used herein, a “therapeutic composition” can comprise an admixture with an aqueous or organic carrier or excipient, and can be compounded, for example, with the usual nontoxic, pharmaceutically acceptable carriers for tablets, pellets, capsules, lyophilizates, suppositories, solutions, emulsions, suspensions, or other form suitable for use. The carriers, in addition to those disclosed above, can include alginate, collagen, glucose, lactose, mannose, gum acacia, gelatin, mannitol, starch paste, magnesium trisilicate, talc, corn starch, keratin, colloidal silica, potato starch, urea, medium chain length triglycerides, dextrans, and other carriers suitable for use in manufacturing preparations, in solid, semisolid, or liquid form. In addition, auxiliary stabilizing, thickening or coloring agents can be used, for example a stabilizing dry agent such as triulose.

[0724] As used herein, a “pharmaceutically acceptable carrier” or “therapeutic effective carrier” is aqueous or nonaqueous (solid), for example alcoholic or oleaginous, or a mixture thereof, and can contain a surfactant, emollient, lubricant, stabilizer, dye, perfume, preservative, acid or base for adjustment of pH, a solvent, emulsifier, gelling agent, moisturizer, stabilizer, wetting agent, time release agent, humectant, or other component commonly included in a particular form of pharmaceutical composition. Pharmaceutically acceptable carriers are well known in the art and include, for example, aqueous solutions such as water or physiologically buffered saline or other solvents or vehicles such as glycols, glycerol, and oils such as olive oil or injectable organic esters. A pharmaceutically acceptable carrier can contain physiologically acceptable compounds that act, for example, to stabilize or to increase the absorption of specific inhibitor, for example, carbohydrates, such as glucose, sucrose or dextrans, antioxidants, such as ascorbic acid or glutathione, chelating agents, low molecular weight proteins or other stabilizers or excipients.

[0725] As used herein, a “insulin-resensitizing” amount of a peptide product is an amount that increases the body's response to endogenous or exogenously administered insulin, typically while reducing body weight, in an individual in need thereof as evidenced by, for example, an oral glucose challenge test or euglycemic clamp test.

[0726] The pharmaceutical compositions can also contain other pharmaceutically acceptable auxiliary substances as required to approximate physiological conditions, such “substances” include, but are not limited to, pH adjusting and buffering agents, tonicity adjusting agents and the like, for example, sodium acetate, sodium lactate, sodium chloride, potassium chloride, calcium chloride, etc. Additionally, the peptide, or variant thereof, suspension may include lipid-protective agents which protect lipids against free-radical and lipid-peroxidative damages on storage. Lipophilic free-radical quenchers, such as alpha-tocopherol and water-soluble iron-specific chelators, such as ferrioxamine, are suitable.

[0727] As used herein, a “surfactant” is a surface active agent that modifies interfacial tension of water. Typically, surfactants have one lipophilic and one hydrophilic group or region in the molecule. Broadly, the group includes soaps, detergents, emulsifiers, dispersing and wetting agents, and several groups of antiseptics. More specifically, surfactants include stearyhriethanolamine, sodium lauryl sulfate, sodium taurocholate, laurylaminopropionic acid, lecithin, benzalkonium chloride, benzethonium chloride and glycerin monostearate; and hydrophilic polymers such as polyvinyl alcohol, polyvinylpyrrolidone, polyethyleneglycol (PEG), carboxymethyleellulose sodium, methylcellulose, hydroxymethylcellulose, hydroxyethyleellulose and hydroxypropylcellulose or alkyl glycosides. In some embodiments, a surfactant is a non-ionic surfactant (e.g, an alkyl glycoside surfactant). In some embodiments, a surfactant is an ionic surfactant.

[0728] As used herein, “alkyl glycoside” refers to any sugar joined by a linkage to any hydrophobic alkyl, as is known in the art. The hydrophobic alkyl can be chosen of any desired size, depending on the hydrophobicity desired and the hydrophilicity of the saccharide moiety. In one aspect, the range of alkyl chains is from 1 to 30 carbon atoms; or from 6 to 16 carbon atoms.

[0729] As used herein, “saccharide” is inclusive of monosaccharides, oligosaccharides or polysaccharides in straight chain or ring forms. Oligosaccharides are saccharides having two or more monosaccharide residues. Some examples of the many possible saccharides suitable for use in functionalized form include glucose, galactose, maltose, maltotriose, maltotetraose, sucrose, trehalose or the like.

[0730] As used herein, “sucrose esters” are sucrose esters of fatty acids. Sucrose esters can take many forms because of the eight hydroxyl groups in sucrose available for reaction and the many fatty acid groups, from acetate on up to larger, more bulky fats that can be reacted with sucrose. This flexibility means that many products and functionalities can be tailored, based on the fatty acid moiety used. Sucrose esters have food and non-food uses, especially as surfactants and emulsifiers, with growing applications in pharmaceuticals, cosmetics, detergents and food additives. They are biodegradable, non-toxic and mild to the skin.

[0731] As used herein, a “suitable” alkyl glycoside means one that is nontoxic and nonionic. In some instances, a suitable alkyl glycoside reduces the immunogenicity or aggregation and increases the bioavailability of a compound when it is administered with the compound via the ocular, nasal, nasolacrimal, sublingual, buccal, inhalation routes or by injection routes such as the subcutaneous, intramuscular, or intravenous routes.

[0732] A “linker amino acid” is any natural or unnatural amino acid that comprises a reactive functional group (de Graaf, A. J., et al. (2009) Bioconjug Chem 20: 128i-1295) that is used for covalent linkage with a functionalized surfactant. By way of example, in some embodiments, a linker amino acid is Lys, or Orn having a reactive functional group —NH₂; or Cys, having a reactive functional group —SH; or Asp or Glu, having a reactive functional group —C(═O)—OH. By way of example, in some other embodiments, a linker amino acid is any amino acid having a reactive functional group such as —OH, —N₃, haloacetyl or an acetylenic group that is used for formation of a covalent linkage with a suitably functionalized surfactant.

[0733] As used herein, a “functionalized surfactant” is a surfactant comprising a reactive group suitable for covalent linkage with a linker amino acid. By way of example, in some embodiments, a functionalized surfactant comprises a carboxylic acid group (e.g., at the 6-position of a monosaccharide) as the reactive group suitable for covalent linkage with a linker amino acid. By way of example, in some embodiments, a functionalized surfactant comprises a —NH₂ group, a —N₃ group, an acetylenic group, a haloacetyl group, a —O—NH₂ group, or a —(CH₂-)m-maleimide group, e.g., at the 6-position of a monosaccharide (as shown in Scheme 6), that allows for covalent linkage with a suitable linker amino acid. In some embodiments, a functionalized surfactant is a compound of Formula II as described herein. Optionally, in some specific embodiments, a functionalized surfactant comprises a covalently attached linker amino acid; the surfactant-modified peptide is then formed by sequential addition of one or more amino acids to the linker amino acid.

[0734] As used herein, the term “peptide” is any peptide comprising two or more amino acids. The term peptide includes polypeptides, short peptides (e.g, peptides comprising between 2-14 amino acids), medium length peptides (15-50) or long chain peptides (e.g., proteins). The terms peptide, polypeptide, medium length peptide and protein may be used interchangeably herein. As used herein, the term “peptide” is interpreted to mean a polymer composed of amino acid residues, related naturally occurring structural variants, and synthetic non-naturally occurring analogs thereof linked via peptide bonds, related naturally occurring structural variants, and synthetic non-naturally occurring analogs thereof. Synthetic peptides can be synthesized, for example, using an automated peptide synthesizer.

[0735] Peptides may contain amino acids other than the 20 gene encoded amino acids. “Peptide(s)” include those modified either by natural processes, such as processing and other post-translational modifications, but also by chemical modification techniques. Such modifications are well described in basic texts and in more detailed monographs, and are well-known to those of skill in the art. It will be appreciated that in some embodiments, the same type of modification is present in the same or varying degree at several sites in a given peptide. Also, a given peptide, in sore embodiments, contains more than one type of modifications. Modifications occur anywhere in a peptide, including the peptide backbone, the amino acid side-chains, and the amino or carboxyl termini.

[0736] The term peptide includes peptides or proteins that comprise natural and unnatural amino acids or analogs of natural amino acids. As used herein, peptide and/or protein “analogs” comprise non-natural amino acids based on natural amino acids, such as tyrosine analogs, which includes para-substituted tyrosines, ortho-substituted tyrosines, and meta substituted tyrosines, wherein the substituent on the tyrosine comprises an acetyl group, a benzoyl group, an amino group, a hydrazine, an hydroxynonane, a thiol group, a carboxy group, a methyl group, an isopropyl group, a C₂-C₂₀ straight chain or branched hydrocarbon, a saturated or unsaturated hydrocarbon, an O-methyl group, a polyether group, a halogen, a nitro group, or the like. Examples of Tyr analogs include 2,4-dimethyl-tyrosine (Dint), 2,4-diethyl-tyrosine, 0-4-allyl-tyrosine, 4-propyl- tyrosine, Car-methyl-tyrosine and the like. Examples of lysine analogs include ornithine (Orn), homo-lysine, Cα-methyl-lysine (CMeLys), and the like. Examples of phenylalanine analogs include, but are not limited to, meta-substituted phenylalanines, wherein the substituent comprises a methoxy group, a C₁-C₂₀ alkyl group, for example a methyl group, an allyl group, an acetyl group, or the like. Specific examples include, but are not limited to, 2,4,6-trimethyl-L-phenylalanine (Tmt), O-methyl- tyrosine, 3-(2-naphthyl)alanine (Nal(2)), 3-(1-naphthyl)alanine (Nal(1)), 3-methyl-phenylalanine, 1,2,3,4-tetrahydroisoquinoline-3-carboxylic acid (Tic), fluorinated phenylalanines, isopropyl-phenylalanine, p-azido-phenylalanine, p-acyl-phenylalanine, p-benzoyl-phenylalanine, p-iodo-phenylalanine, p-bromophenylalanine, p-amino- phenylalanine, and isopropyl- phenylalanine, and the like. Other nonstandard or unnatural amino acids used in peptide analog design include and are not limited to C-alpha-disubstituted amino acids such as Aib, Cα-diethylglycine (Deg), aminocyclopentane-1-carboxylic acid (Ac5c), and the like. Such amino acids frequently lead to a restrained structure, often biased toward an alpha helical structure (Kaul, R. and Balaram, P. (1999) Bioorg Med Chem 7: 105-117). Additional examples of such unnatural amino acids useful in analog design are homo-arginine (Har), and the like. Substitution of reduced amide bonds in certain instances leads to improved protection from enzymatic destruction or alters receptor binding. By way of example, incorporation of a Tic-Phe dipeptide unit with a reduced amide bond between the residues (designated as Tic-Ψ[CH₂—NH]-Ψ-Phe) reduces enzymatic degradation. Accordingly, also contemplated within the scope of embodiments described herein are surfactants covalently attached to peptides that comprise modified amino acids and/or peptide analogs described above. Certain non-natural amino acids are shown below.

[chemical structure]

[0737] As used herein, the term “variant” is interpreted to mean a peptide that differs from a reference peptide, but retains essential properties. A typical variant of a peptide differs in amino acid sequence from another, reference peptide. Generally, differences are limited so that the sequences of the reference peptide and the variant are closely similar overall and, in many regions, identical. A variant and reference peptide may differ in amino acid sequence by one or more substitutions, additions, deletions in any combination. A substituted or inserted amino acid residue may or may not be one encoded by the genetic code. Non-naturally occurring variants of peptides may be made by mutagenesis techniques, by direct synthesis, and by other suitable recombinant methods.

### Methods

[0738] Provided herein, in some embodiments are methods for prevention and/or treatment of conditions associated with decreases in insulin sensitivity comprising administration of a therapeutically effective amount of a surfactant-modified peptide and/or protein product described herein (e.g., a peptide product of Formula I-A, III-A, or III-B) to individuals in need thereof. In some embodiments, the conditions characterized by decreases in insulin sensitivity include, and are not limited to, the metabolic syndrome, obesity-related insulin resistance, hypertension, systemic inflammation associated with high C reactive protein, diabetes, or the like.

[0739] Also provided herein are methods for treatment of insulin resistance comprising administration of a therapeutically effective amount of a surfactant-modified peptide and/or protein product described herein (e.g., a peptide product of Formula I-A, III-A, or III-B) to individuals in need thereof. In some embodiments, the insulin resistance is associated with the metabolic syndrome (Syndrome X) and/or diabetes.

[0740] Further provided herein are methods for stimulating resensitization of the body to insulin comprising administration of a therapeutically effective amount of a surfactant-modified peptide and/or protein product described herein (e.g. a peptide product of Formula I-A, III-A, or IT-B) to individuals in need thereof.

[0741] In yet further embodiments, provided herein are methods for increasing insulin sensitivity through weight loss, comprising administration of a therapeutically effective amount of a surfactant-modified peptide and/or protein product described herein (e.g. a peptide product of Formula I-A, III-A, or III-B and in Table 1 of FIG. 1, Table 2 of FIG. 2, and Table 3 of FIG. 3) to individuals in need thereof.

[0742] Also provided herein are methods of treating diabetes or prediabetes comprising administering to a subject in need thereof a therapeutically effective amount of a peptide product described above and herein and in Table 1 of FIG. 1, Table 2 of FIG. 2, and Table 3 of FIG. 3 to an individual in need thereof.

[0743] Provided herein are methods for treating or delaying the progression or onset of conditions selected from diabetes, diabetic retinopathy, diabetic neuropathy, diabetic nephropathy, insulin resistance, hyperglycemia, hyperinsulinemia, metabolic syndrome, diabetic complications, elevated blood levels of free fatty acids or glycerol, hyperlipidemia, obesity, hypertriglyceridemia, atherosclerosis, acute cardiovascular syndrome, infarction, ischemic reperfusion a hypertension, comprising administering a therapeutically effective amount of a peptide product described herein and in Table 1 of FIG. 1, Table 2 of FIG. 2, and Table 3 of FIG. 3 to an individual in need thereof. In an additional embodiment, provided herein are methods for treating delays in wound healing comprising administering a therapeutically effective amount of a peptide product described herein and in Table 1 of FIG. 1, Table 2 of FIG. 2., and Table 3 of FIG. 3 to an individual in need thereof.

[0744] In one embodiment said condition to be treated is diabetes. In one embodiment said condition to be treated is insulin resistance. In one embodiment said condition to be treated is the metabolic syndrome. In one embodiment said effective amount of said peptide is from about 0.1 μg/kg/day to about 100.0 μg/kg/day.

[0745] In one embodiment the method of administration is parenteral. In one embodiment the method of administration is per oral. In one embodiment the method of administration is subcutaneous. In one embodiment the method of administration is nasal insufflation.

[0746] Further provided herein is a method of reducing weight gain or inducing weight loss comprising administering a therapeutically effective amount of a peptide product described herein and in Table 1 of FIG. 1, Table 2 of FIG. 2, and Table 3 of FIG. 3 to an individual in need thereof. In some embodiments, the weight gain is associated with metabolic syndrome.

[0747] Provided herein is a method of treating hypoglycemia comprising administering a therapeutically effective amount of a peptide product described herein and in Table 1 of FIG. 1, Table 2 of FIG. 2, and Table 3 of FIG. 3 to an individual in need thereof.

[0748] Also provided herein are methods for treatment of diabetes comprising administering a therapeutically effective amount of a peptide product described herein and in Table 1 of FIG. 1, Table 2 of FIG. 2, and Table 3 of FIG. 3 to an individual in need thereof and at least one additional therapeutic agent; wherein said therapeutic agent is selected from an antidiabetic agent, an anti-obesity agent, a satiety agent, an anti-inflammatory agent, an anti-hypertensive agent, an anti-atherosclerotic agent and a lipid-lowering agent.

[0749] In some embodiments of the methods described above, the peptide and/or protein that is covalently attached to a surfactant is a glucagon or GLP-1 peptide, or an analog thereof. In some embodiments, the surfactant-modified peptide and/or protein (e.g., a peptide product of Formula I-A, III-A, or III-B) is administered prophylactically and delays occurrence of any condition associated with insulin resistance, including and not limited to the metabolic syndrome, hypertension, diabetes, type 2 diabetes, gestational diabetes, hyperlipidemia, atherosclerosis, systemic inflammation or the like. In some embodiments, the surfactant-modified peptide and/or protein (e.g., a peptide product of Formula I-A, III-A, or III-B) is administered therapeutically and delays progression of any condition associated with the metabolic syndrome, hypertension, diabetes, type 2 diabetes, gestational diabetes, hyperlipidemia, atherosclerosis, systemic inflammation or the like. In some embodiments, the surfactant-modified peptide and/or protein (e,g. a peptide product of Formula I-A, III-A, or III-B) is administered prophylactically and/or therapeutically and delays progression of insulin resistance to diabetes. In some embodiments, the surfactant-modified peptide and/or protein (e.g., a peptide product of Formula I-A, III-A, or III-B) is administered prophylactically and/or therapeutically and reduces or halts further loss of insulin resistance, thereby stabilizing disease.

[0750] In some embodiments, the surfactant-modified peptide and/or protein (e.g., a peptide product of Formula I-A, III-A, or III-B) is administered parenterally. In some embodiments, the surfactant-modified peptide and/or protein (e.g., a peptide product of Formula I-A, III-A, or III-B) is administered subcutaneously. In some embodiments, the surfactant-modified peptide and/or protein (e.g., a peptide product of Formula I-A, III-A, or III-B) is administered by nasal insufflation.

[0751] In some embodiments of the methods described above, the surfactant-modified peptide and/or protein (e.g., a peptide product of Formula I-A, III-A, or III-B) has a longer duration of action compared to a pharmaceutical comprising currently known therapeutics (e.g., exenatide, metformin or the like).

### Combination Therapy

[0752] In some embodiments of the methods described above, the surfactant-modified peptide and/or protein (e.g., a peptide product of Formula I-A, III-A, or III-B) is administered in combination with other methods of treatment of the metabolic syndrome selected from the group comprising an antidiabetic agent, an anti-obesity agent, an anti-hypertensive agent, an anti-atherosclerotic agent and a lipid-lowering agent. By way of example, efficacious antidiabetic agents suitable for administration in combination with a surfactant-modified peptide and/or protein product described herein include a biguanide, a sulfonylurea, a glucosidase inhibitor a PPAR γ agonist, a PP AR α/γ dual agonist, an aP2 inhibitor, a DPP4 inhibitor, an insulin sensitizer, a GLP-1 analog, insulin and a meglitinide. Additional examples include metformin, glyburide, glimnepiride, glipyride, glipizide, chlorpropamide, gliclazide, acarbose, mniglitol, pioglitazone, troglitazone, rosiglitazone, rnuraglitazar, insulin, Gl-262570, isaglitazone, JTT-501, NN-2344, L895 645, YM-440, R-119702, A19677, repaglinide, nateglinide, KAD 1129, AR-HO 39242, GW-40 1 5 44, KRP2 I 7, AC2993, LY3 1 5902, NVP-DPP-72 8A and saxagliptin.

[0753] In some embodiments of the methods described above, the surfactant-modified peptide and/or protein (e.g., a peptide product of Formula I-A, III-A, or III-B) is administered in combination with other methods of treatment of the metabolic syndrome selected from the group of efficacious anti-obesity agents. By way of example, efficacious anti-obesity agents suitable for administration with the peptide products described herein include beta 3 adrenergic agonist, a lipase inhibitor, a serotonin (and dopamine) reuptake inhibitor, a thyroid receptor beta compound, a CB-1 antagonist, a NPY-Y2 and a NPY-Y4 receptor agonist and an anorectic agent. Specific members of these classes comprise orlistat. AfL-962, A19671,,L750355, CP331648, sibutramine, topiramate, axokine, dexamphetaniine, phentermine, phenylpropanolamine, rimonabant (SR1 417164), and mazindol.

[0754] In some embodiments of the methods described above, the surfactant-modified peptide and/or protein (e.g., a peptide product of Formula I-A, III-A, or III-B) is administered in combination with other methods of treatment of the metabolic syndrome selected from the group of efficacious lipid-lowering agents. By way of example, efficacious lipid-lowering agents suitable for administration with the peptide products described herein include agents selected from the group consisting of an MTP inhibitor, cholesterol ester transfer protein, an HMG CoA reductase inhibitor, a squalene synthetase inhibitor, a fibric acid derivative, an upregulator of LDL receptor activity, a lipoxygenase inhibitor, and an ACAT inhibitor. Specific examples from these classes comprise pravastatin, lovastatin, simvastatin, atorvastatin, cerivastatin, fluvastatin, nisvastatin, visastatin, fenofibrate, gemfibrozil, clofihrate, avasimibe, TS—962, MD-700, CP -52941 4, and LY295 427.

[0755] In some embodiments of the methods described above, the surfactant-modified peptide and/or protein (e.g., a peptide product of Formula I-A, III-A, or III-B) is administered in combination with peptide hormones, and analogs thereof, that are known to exhibit pro-satiety effects in animal models and in mnan. Contemplated within the scope of embodiments presented herein is a combination of the peptide products described herein and long-acting satiety agents for treatment of obesity. Examples of such peptide satiety agents include GLP-1, pancreatic polypeptide (PP), cholecystokinin (CCK), peptide YY (PYY), amylin, calcitonin, OXM, neuropeptide Y (NPY), and analogs thereof (Bloom, S.R,, et al. (2008) Mol Interv 8: 82-98; Field, B. C., et al. (2009) Br J Clin Pharmacol 68: 830-843).

[0756] Also contemplated within the scope of embodiments presented herein are methods for treatment of obesity comprising administration of peptide products described herein in combination with peptide hormones including and not limited to leptin, ghrelin and CART (cocaine- and amphetamine-regulated transcript) analogs and antagonists.

[0757] Additional peptide products in the body are associated with fat cells or the obese state (adipokines) and are known to have proinflammatory effects (Gonzalez-Periz, A. and Claria, J. (2010) ScientificWorldjournal 10: 832-856). Such agents will have additional favorable actions when used in combination with the peptide products described herein. Examples of agents that offer a beneficial effect when used in combination with the peptide products described herein include analogs and antagonists of adiponectin, chemerin, visfatin, nesfatin, omentin, resistin, TNFalpha, IL-6 and obestatin.

### Intermediates

[0758] In one embodiment the provided herein are intermediates and/or reagents comprising a surfactant moiety and a reactive functional group capable of forming a bond with a reactive functional group on a natural or unnatural amino acid. These intermediates and/or reagents allow for improvement in the bioavailability and pharmaceutical, pharmacokinetic and/or pharmacodynamic behavior of peptides and/or proteins of use in human and animal disease. Covalent attachment of such intermediates and/or reagents via functional group on a side chain of an amino acid, for example on an epsilon-amino function of Lys, the sulfhydryl of Cys, or at the amino or carboxy terminus of the peptide and/or protein target allows for synthesis of the peptide products described herein. In specific embodiments, non-ionic surfactant moieties are mono or disaccharides with an O-alkyl glycosidic substitution, said glycosidic linkage being of the alpha or beta configuration. In specific embodiments, O-alkyl chains are from C₁-C₂₀ or from C₆-C₁₆ alkyl chains.

[0759] In another embodiment provided herein are intermediates and/or reagents comprising a non-ionic surfactant moiety with certain alkyl glycosidic linkage that mimic O-alkyl glycosidic linkages and a reactive functional group capable of forming a bond with a reactive functional group on a natural or unnatural amino acid. Such intermediates and/or reagents contain S-linked alkyl chains or N-linked alkyl chains and have altered chemical and/or enzymatic stability compared to the O-linked alkyl glycoside-linked products.

[0760] In some embodiments, an intermediate and/or reagent provided herein is a compound wherein the hydrophilic group is a modified glucose, galactose, maltose, glucuronic acid, digliucuronic acid or the like. In some embodiments, the hydrophilic group is glucose, maltose, glucuronic acid, or diglucuronic acid and the hydrophobic group is a C₁-C₂₁ alkyl chain or an aralkyl chain. In some embodiments the glycosidic linkage to the hydrophobic group is of an alpha configuration and in some the linkage is beta at the anomeric center on the saccharide.

[0761] In some embodiments, the hydrophilic group is glucose, maltose, glucuronic acid, or diglucuronic acid and the hydrophobic group is a C₁-C₂₀ alkyl or aralkyl chain.

[0762] In some embodiments, an intermediate and/or reagent provided herein comprises a surfactant containing a reactive functional group that is a carboxylic acid group, an amino group, an azide, art aldehyde, a maleimide, a sulfhydryl, a hydroxylamino group, an alkyne or the like.

[0763] In some embodiments, the intermediate and/or reagent is an O-linked alkyl glycoside with one of the hydroxyl functions modified to be a carboxylic acid or amino functional group. In some embodiments, the reagent is a 1-O-alkyl glucuronic acid of alpha or beta configuration and the alkyl chain is from C₁ to C₂₀ in length. In some of such embodiments, the alkyl group is from C₆ to C₁₆ in length.

[0764] In some embodiments, the reagent comprises a 1-O-alkyl diglucuronic acid of alpha or beta configuration and the alkyl chain is from C₁ to C₂* in length. In some of such embodiments, the alkyl group is from C₆ to C₁₆ in length.

[0765] In some embodiments, the reagent is an S-linked alkyl glycoside of alpha or beta, configuration with one of the hydroxyl functions modified to be a carboxylic acid or amino functional group.

[0766] In some embodiments, the reagent is an N-linked alkyl glycoside of alpha or beta configuration with one of the hydroxyl functions modified to be a carboxylic acid or amino functional group.

[0767] In yet another embodiment the provided herein are peptide and/or protein products containing a covalently linked alkyl glycoside with properties acceptable for use in human and animal disease. Scheme 1 lists exemplary non-ionic surfactants that can be modified to yield the reagents and/or intermediates that are useful for synthesis of surfactant-modified peptide products described herein.

[chemical structure]

[0768] In some embodiments, the covalently modified peptides and/or proteins described herein incorporate a surfactant moiety into the peptide structure. In specific embodiments, the covalently modified peptides and/or proteins described herein incorporate a non-ionic surfactant of the alkyl, optionally substituted alkyl, alkoxyaryl, or aralkyl glycoside class. Alkyl glycosides are important commodities and are widely used in the food, service and cleaning industries. Thus their production on commercially significant scale has been the subject of extensive study. Both enzymatic and chemical processes are available for their production at very low cost (Park, D. W., et al. (2000) Biotechnology Letters 22: 951-956). Additional examples of well known routes to the 1-alkyl glycosides using acid catalyzed glycosidation or Koenigs-Knorr coupling are illustrated in Milkereit, G., et al. (2004) Chem Phys Lipids 127: 47-63; Vili, V., et al. (2000) Chen. Phys. Lipids 104, 75-9; Helferich, B., et al., (1956) Chem. Ber. 89, 314-315.and references therein. In the case of optionally substituted alcohols, functional group protection (preferably acid labile such as t-butyl or p-methoxybenzyi, for example as esters) are installed by means well known to those skilled in the art (see Greene, T. and Wuts, P.G.M. (1999) Protective Groups in Organic Synthesis, John Wiley & Sons, Inc.and references therein). For example, protection of 16-hydroxyhexadecanoic acid by formation of the t-butyi ester using N,N-dimethylformamide di-tert-butyl acetal, or similar reagent, provides t-butyi 16-hydroxyhexadecanoate for glycosylation of the desired acetobromsugar, catalyzed by me^{r}cury or silver salts.

[0769] These alkyl, and optionally substituted alkyl, glycosides can be modified further to generate the intermediates for the synthesis of the covalently modified peptides and/or proteins described herein. Thus it is known that 1-dodecyl beta-D-glucoside is preferentially oxidized on the 6-position to yield the corresponding giucuronic acid analog in high yield when using the Docket No.: MEDO05UUS4 unprotected material and platinum black catalyst in the presence of oxygen (van Bekkum, H. (1990) Carbohydrates as Organic Raw Materials 289-310). Additional chemoselective methods for oxidation of the primary alcohol at the 6 position of alkyl glucosides are available. For example, use of catalytic amounts of 2,2,6,6-tetramethyl-1-piperidinyloxyl (TEMPO) with stoichiometric amounts of the organic oxidant [bis(acetoxy)iodo]benzene (BAIB) (De Mico, A., et al. (1997) J Org Chem 1997: 6974-6977) gave outstanding yields of nucleoside-5′-carboxylic acids (Epp, J. B. and Widlanski, T. S. (1999) J Org Chem 64: 293-295) by oxidation of the primary hydroxyl. This oxidation is chemoselective for the primary hydroxyl even when the other, secondary hydroxyls are unprotected (Codee, J. D., et al. (2005) J Am Chem Soc 127: 3767-3773). In a similar manner, 1-dodecyl β-D-glucopyranoside, 1-tetradecyl β-D-glucopyranoside, 1-hexadecyl β-D-glucopyranoside, 1-octadecyl β-D-glucopyranoside and 1-eicosyl β-D-giucopyranoside were oxidized to the corresponding uronic acids (1-dodecyl β-D-glucuronic acid, 1-tetradecyl β-D-glucuronic acid, 1-hexadecyl β-D-glucuronic acid, 1-octadecyl β-D-glucuronic acid, 1-eicosyl β-D-glucuronic acid) by oxidation with TEMPO using KBr and sodium hypochlorite as stoichiometric oxidant (Milkereit, G., et al, (2004) Chem Phys Lipids 127: 47-63) in water. A mild oxidation procedure using (diacetoxyiodo)benzene (DAIB aka BAIB) is given in the Examples. Certain of these glucuronic acid intermediates are commercially available (for example octyl b-D-glucuronic acid; Carbosynth, MO 07928) and, as indicated, a broad range are subject to preparation by routine methods (Schamann, M. and Schafer, H. J. (2003) Eur J Org Chem 351-358; Van den Bos, L J., et al. (2007) Eur J Org Chem 3963-3976) or, upon request, from commercial sources. Scheme 2 illustrates, as examples, certain functionalized surfactant intermediates comprising a —COOH group as a reactive functional group that are used to prepare the intermediates and/or reagents described herein.

[chemical structure]

[0770] Similarly, aralkyl glycosides (including alkoxyaryl) can form the basis for closely related nonionic surfactant reagents. For example, 4-alkoxyphenyl β-D-glucopyranosides are readily synthesized by the reaction of 4-alkyloxyphenols with penta-O-acetyl β-D-glucose in the presence of boron trifluoride etherate. Subsequent deacetylation using trimethylamine in methanol/water and selective oxidation as described above and in the examples, yields the alkoxyaryl glucuronic, acid reagents suitable for forming the reagents and peptides described herein ((Smits, E., et al. (1996) J Chem Soc, Per-kin Trans I 2873-2877; Smits, E., et al. (1997) Liquid Crystals 23: 481-488).

[chemical structure]

[0771] The glucuronic acid class of intermediate is readily activated by standard coupling agents for linkage to an amino acid side chain, e.g. that of Lys. Thus Fmoc-Lys-O-TMS (trimeithylsilyl=TMS) can be reacted with octyl beta-D-glucuronic acid in the presence of a coupling agent and the O-TMS protecting group can then be hydrolyzed on aqueous workup to yield Fmoc-Lys(1-octyl beta-D-glucuronamide) as shown in Scheme 4. This reagent can be used for incorporation into the solid phase synthesis of peptides, using standard coupling protocols, when it is desired to incorporate the surfactant moiety near the N-terminal region of the molecule. The secondary hydroxyl groups can be left unprotected, due to the very much higher reactivity of the Lys amino functional group or they can be protected by peracetylation. If an acetyl protected form is used, the acetyl protecting groups can be removed in high yield by treatment with either MeOH/NaOMe or by MeOH/Et₃N. Scheme 4 illustrates preparation of the reagents described herein.

[chemical structure]

[0772] In some embodiments, reagents and/or intermediates for the preparation of the biologically active peptide products described herein comprise a family of surfactant-modified linker amino acids for incorporation into synthetic peptide products. Thus in one embodiment, peptide products described herein are synthesized in a linear fashion wherein a functionalized surfactant is attached to a reversibly-protected linker amino acid via functional group on a side chain of a linker amino acid (e.g., an amino group of a lysine residue) to yield a proprietary reagent (as shown in Scheme 4.) which can be incorporated into the growing peptide chain and then the remaining peptide is synthesized by attachment of further amino acids to the cysteine residue. Protecting group suitable for synthesis of modified peptides and/or protein described herein are described in, for example, T. W. Green, P. G. M. Wuts, Protective Groups in Organic Synthesis, Wiley-Interscience, New York, 1999, 503-507, 736-739, which disclosure is incorporated herein by reference.

[0773] In another embodiment, peptide products described herein are synthesized by covalent attachment of a functionalized surfactant to a full-length peptide via suitable functional group on a linker amino acid that is in the peptide chain.

[0774] Alternatively a functionalized surfactant can be added to a linker amino acid side chain which has been deprotected during the course of the solid phase synthesis of the peptide. As an example, an alkyl glucuronyl group can be added directly to a linker amino acid side chain (e.g., a deprotected Lys side chain) during the solid phase synthesis of the peptide. For example, use of Fmoc-Lys(Alloc)-OH as a subunit provides orthogonal protection that can be removed while the peptide is still on the resin. Thus deprotection of the Lys side chain using Pd/thiobarbital, Pd/1,3-dimethyl barbituric acid (DMBA) or other Alloc deprotection recipe allows exposure of the amino group for coupling with the acyl protected or unprotected I-octyl beta-D-glucuronic acid unit or for side chain lactam formation. Final deprotection with a low % CF₃CO₂H (TFA) cleavage cocktail will then deliver the desired product. Although the glycosidic linkage is labile to strong acid, the experience here and by others is that it is relatively stable to low % TFA cleavage conditions. Alternatively, acyl protection (e.g. acetyl, Ac; benzoyl, Bz) or trialkylsilyl protection on the saccharide OH functional groups may be used to provide increased protection to the glycosidic linkage. Subsequent deprotection by base (NH₂NH/MeOH; NH₃/MeOH, NaOMe/MeOH) yields the desired deprotected product. Scheme 4 illustrates reagents described herein. Scheme 5 illustrates a non-limiting example of a peptide intermediate described herein. Although this example illustrates a peptide with the surfactant linkage at the N-terminus of the peptide, the methods described herein are suitable for synthesis of peptide intermediates having the linkage to a surfactant in the middle region, the C-terminal region or any position within the peptide.

[chemical structure]

[0775] Additional reagents are generated by modification of the 6-position functional group to give varied means of linkage to amino acid side chain functional groups, as shown below in Scheme 6. Thus amino substitution can be used for linkage to Asp or Glu side chains. Azido or alkyne substitution can be used for linkage to unnatural amino acids containing the complementary acceptor for Huisgen 3+2 cycloaddition (Gauthier, M. A. and Klok, H. A. (2008) Chem Commun (Camb) 2591-2611). Aminoxy or aldehyde functional groups can be used to link to aldehyde (i.e. oxime linkage) or to amino functions (i.e. reductive alkylation), respectively. The maleimide or —NH—(C═O)—CH₂—Br functional group can bind chemoselectively with a Cys or other SH functional group. These types of linkage strategies are advantageous when used in conjunction with the reagents described herein. Interconversion of functional groups is widely practiced in organic synthesis and comprehensive lists of multiple routes to each of the functional group modifications listed herein are available (Larock, R. C. (1999)) “Comprehensive Organic Transformations”, VCH Publishers, New York.

[0776] Thus, for example, the primary hydroxyl on position 6 of octyl 1-β-D-glucoside is converted to the azide by activation and displacement with an azide anion, reactions such as reactions used in carbohydrate chemistry (e.g. by tosylation followed by NaN s). The corresponding azide is reduced to the amino function by reduction With thiolacetic acid in pyridine (Elofsson, M., et al. (1997) Tetrahedron 53: 369-390) or by similar methods of amino group generation (Stangier, P., et al. (1994) Liquid Crystals 17: 589-595). Approaches to the acetylene, aminoxy, and aldehyde moieties are, best carried out on the triaecetoxy form, available from the commercially available glucoside by treatment with Ac₂O, followed by mild hydrolysis of the primary amine. This 6-hydroxy form can be selectively oxidized to the aldehyde, or activated as a tosylate or triflate and displaced by NH₂OH or by sodium acetylide. The maleimide linkage can be through a carbon linkage as shown or, preferably though an O or amide linkage, again by displacement of the activated hydroxyl or coupling of the glucuronic acid derivative to an amino linked maleimide reagent, well known in the art. Additional functional group interconversions are well known to those of average skill in the art of medicinal chemistry and are within the scope of the embodiments described herein.

[0777] Also contemplated within the scope of synthetic methods described herein are surfactants wherein the saccharide and hydrophobic chain are covalently attached via an alpha glycosidic linkage, Synthetic routes to predominantly a-linked glycosides are well known in the art and typically originate with the peracetyl sugar and use acidic catalysis (e.g. SnC₄, BF₃ or HCl) to effect the α-glycosylation (Cudic, M. and Burstein, G.D. (2008) Methods Mol Biol 494: 187-208; Vill, V., et al. (2000) Chem Phys Lipids 104: 75-91, incorporated herein by reference for such disclosure). Similar synthetic routes exist for disaccharide glycosides (von Minden, H. M., et al. (2000) Chem Phys Lipids 106: 157-179, incorporated herein by reference for such disclosure). Functional group interconversions then proceed as above to lead to the 6-carboxylic acid, et al. for generation of the corresponding α-linked^{r}eagents.

[0778] Scheme 6 lists certain compounds and reagents useful in the synthesis of the covalently modified peptides and/or proteins described herein. Standard nomenclature using single letter abbreviations for amino acids are used.

[chemical structure]

[0779] Many alkyl glycosides can be synthesized by known procedures, as described, e.g., in (Rosevear, P., et al. (1980) Biochemistry 19: 4108-4115, Li, Y.T., et al. (1991) J Biol Chem 266: 10723-10726) or Koeltzow and Urfer, J. Am. Oil Chem. Soc., 61:1651-1655 (1984), U.S. Pat. No. 3,219,656 and U.S. Pat. No. 3,839,318 or enzymatically, as described, e.g., in (Li, Y.T., et al. (1991) J Biol Chem 266: 10723-10726, Gopalan, V., et al. (1992) J Biol Chem 267: 9629-9638). O-alkyl linkages to natural amino acids such as Ser can be carried out on the Fmoc-Ser-OH using peracetylglucose to yield Nα-Fmoc-4-O-(2,3,4,6-tetra-O-acetyl-β-D-giucopyranosyl)-L-serine. This material is selectively deprotected at the primary carbon atom (position 6) and selectively oxidized using TEMPO/BAIB as described above to yield the corresponding 6-carboxyl function which may be coupled to lipophilic amines to generate a new class of nonionic surfactant and reagents (Scheme 7).

[chemical structure]

[0780] The linkage between the hydrophobic alkyl and the hydrophilic saccharide can include, among other possibilities, a glycosidic, thioglycosidic, amide (Carbohydrates as Organic Raw Materials, F. W. Lichtenthaler ed., VCH Publishers, New York, 1991), ureido (Austrian Pat. 386,414 (1988); Chem. Abstr. 1 10:137536p (1989); see Gruber, H. and Greber, G., “Reactive Sucrose Derivatives” in Carbohydrates as Organic Raw Materials, pp. 95-116) or ester linkage (Sugar Esters: Preparation and Application, J. C. Colbert ed., (Noyes Data Corp., New Jersey), (1974)).

[0781] Examples from which useful alkyl glycosides can be chosen for modification to the reagents or for the formulation of the products described herein, include: alkyl glycosides, such as octyl-, nonyl-, decyl-, undecyl-, dodecyi-, tridecyl-, tetradecyl, pentadecyl-, hexadecyl-, heptadecyl-, and octadecyl-D-maltoside, -melibioside, -glucoside or -sucroside (i.e., sucrose ester) (synthesized according to Koeltzow and Urfer; Anatrace Inc., Maumee, Ohio; Calbiochem, San Diego, Calif.; Fiuka Chemie, Switzerland); alkyl thiomnaltosides, such as heptyl, octyl, dodecyl-, tridecyl-, and tetradecyil-β-D-thiomaltoside (synthesized according to Defaye, .I and Pederson, C., “Hydrogen Fluoride, Solvent and Reagent for Carbohydrate Conversion Technology” in Carbohydrates as Organic Raw Materials, 247-265 (F. W. Lichtenthaler, ed.) VCI Publishers, New York (1991); Ferenci, T., J. Bacteriol, 144:7-11 (1980)); alkyl thioglucosides, such as 1-dodecyl- or 1-octyl-thio α-or β-D-glucopyranoside (Anatrace, Inc., Maumee, Ohio; see Saito, S. and Tsuchiya, T. Chem. Pharm. Bull. 33:503-508 (1985)); alkyl thiosucroses (synthesized according to, for example, Binder, T. P. and Robyt, J F., Carbohydr. Res. 140:9-20 (1985)); alkyl maltotriosides (synthesized according to Koeltzow and Urfer); long chain aliphatic carbonic acid amides of sucrose amino-alkyl ethers; (synthesized according to Austrian Patent 382,381 (1987); Chem. Abstr., 108:114719 (1988) and Gruber and Greber pp. 95-116); derivatives of palatinose and isomaltamine linked by amide linkage to an alkyl chain (synthesized according to Kunz, M., “Sucrose-based Hydrophilic Building Blocks as Intermediates for the Synthesis of Surfactants and Polymers” in Carbohydrates as Organic Raw Materials, 127-153); derivatives of isomaltamine linked by urea to an alkyl chain (synthesized according to Kunz); long chain aliphatic carbonic acid ureides of sucrose amino-alkyl ethers (synthesized according to Gruber and Greber, pp. 95-116); and long chain aliphatic carbonic acid amides of sucrose amino-alkyl ethers (synthesized according to Austrian Patent 382,381 (1987), Chem. Abstr., 108:114719 (1988) and Gruber and Greber, pp. 95-116).

[0782] Some preferred glycosides which can be further modified to incorporate reactive functionality for linkage to the peptide include the saccharides maltose, sucrose, glucose and galactose linked by glycosidic or ester linkage to an alkyl chain of 6, 8, 10, 12, 14, or 16 carbon atoms, e.g., hexyl-, octyl-, decyl-, dodecyl-, tetradecyl-, and hexadecyl-maltoside, -melibioside, -sucroside, -glucoside and -galactoside. In the body these glycosides are degraded to non-toxic alcohol or fatty acid and an oligosaccharide or saccharide. The above examples are illustrative of the types of alkyl glycosides to be used in the methods claimed herein, however the list is not intended to be exhaustive.

[0783] Generally, these surfactants (e.g., alkyl glycosides) are optionally designed or selected to modify the biological properties of the peptide, such as to modulate bioavailability, half-life, receptor selectivity, toxicity, biodistribution, solubility, stability, e.g. thermal, hydrolytic, oxidative, resistance to enzymatic degradation, and the like, facility for purification and processing, structural properties, spectroscopic properties, chemical and/or photochemical properties, catalytic activity, redox potential, ability to react with other molecules, e.g., covalently or noncovalently, and the like.

### Surfactants

[0784] The term “surfactant” comes from shortening the phrase “surface active agent”. In pharmaceutical applications, surfactants are useful in liquid pharmaceutical formulations in which they serve a number of purposes, acting as emulsifiers, solubilizers, and wetting agents. Emulsifiers stabilize the aqueous solutions of lipophilic or partially lipophilic substances. Solubilizers increase the solubility of components of pharmaceutical compositions increasing the concentration which can be achieved. A wetting agent is a chemical additive which reduces the surface tension of a fluid, inducing it to spread readily on a surface to which it is applied, thus causing even “wetting” of the surface with the fluids. Wetting agents provide a means for the liquid formulation to achieve intimate contact with the mucous membrane or other surface areas with which the pharmaceutical formulation comes in contact. Thus surfactants may be useful additives for stabilization of the formulation of the peptide products described herein as well as for the modification of the properties of the peptide itself.

[0785] In specific embodiments, alkyl glycosides which are synthetically accessible, e.g., the alkyl glycosides dodecyl, tridecyl and tetradecyl maltoside, -melibiosides or -glucoside as well as sucrose dodecanoate, tridecanoate, and tetradecanoate are suitable for covalent attachment to peptides as described herein. Similarly, the corresponding alkylthioglucosides are stable, synthetically accessible surfactants which are acceptable for formulation development.

[0786] A wide range of physical and surfactant properties can be achieved by appropriate modification of the hydrophobic or hydrophilic regions of the surfactant (e.g., the alkyl glycoside). For example, a study comparing the bilayer activity of dodecyl maltoside (DM) with that of dodecyl glucoside (DG) found that of DM to be more than three times higher than that of DG, despite having the same length of hydrophobic tail (Lopez, 0., et al. (2002) Colloid Polym Sci 280: 352-357). In this particular instance the identity of the polar region (disaccharide vs. monosaccharide) influences surfactant behavior. In the case of a surfactant linked to a peptide, e.g. the peptide products described herein, the peptide region also may contribute hydrophobic or hydrophilic character to the overall molecule. Thus tuning of the physical and surfactant properties may be used to achieve the particular physical and pharmaceutical properties suitable for the individual peptide targets.

### PEG Modification

[0787] In some embodiments, surfactant-modified peptide products described herein are further modified to incorporate one or more PEG moieties (Veronese, F. M. and Mero, A. (2008) BioDrugs 22: 315-329). In some instances, incorporation of large PEG chains prevents filtration of the peptide in the glomeruli in the kidney into the dilute urine forming there (Nestor, J.J., Jr. (2009) Current Medicinal Chemistry 16: 4399-4418, Caliceti, P. and Veronese, F.M. (2003) Adv Drug Deliv Rev 55: 1261-1277). In some embodiments, an optional PEG hydrophilic chain allows for balancing the solubility and physical properties of the peptides or proteins that have been rendered hydrophobic by the incorporation of the longer chain alkyl glycoside moiety.

[0788] PEGylation of a protein can have potentially negative effects as well. Thus PEGylation can cause a substantial loss of biological activity for some proteins and this may relate to ligands for specific classes of receptors. In such instances there may be a benefit to reversible PEGylation (Peleg-Shuiman, T., et al. (2004) J Med Chem 47: 4897-4904, Greenwald, R. B., et al. (2003) Adv Drug Deliv Rev 55: 217-250, Roberts, M. J. and Harris, J M. (1998) J Pharm Sci 87: 1440-14⁴5).

[0789] In addition, the increased molecular mass may prevent penetration of physiological barriers other than the glomerular membrane barrier. For example, it has been suggested that high molecular weight forms of PEGylation may prevent penetration to some tissues and thereby reduce therapeutic efficacy. In addition, high molecular weight may prevent uptake across mucosal membrane barriers (nasal, buccal, vaginal, oral, rectal, lung delivery). However delayed uptake may be highly advantageous for administration of stable molecules to the lung, substantially prolonging the duration of action. The peptide and/or protein products described herein have increased transmucosal bioavailability and this will allow longer chain PEG modifications to be used in conjunction with the surfactant modification with the achievement of commercially significant bioavailability following intranasal or other transmucosal route.

[0790] In some embodiments, long chain PEG polymers, and short chain PEG polymers are suitable for modification of the proteins and peptides described herein. Administration of treatments for diabetes by inhalation is a new approach for drug delivery and the lung has a highly permeable barrier (e.g. Exubera). For this application, delayed penetration of the lung barrier, preferred forms of PEGylation are in the lower molecular weight range of C, to C₄₆₆ (roughly 250 to 10,000 Da). Thus while a primary route to prolongation by PEG is the achievement of an “effective molecular weight” above the glomerular filtration cut-off (greater than 68 kDa), use of shorter chains may be a route for prolongation of residence in the lung for treatment of lung diseases and other respiratory conditions. Thus PEG chains of about 500 to 3000 Da are of sufficient size to slow the entry into the peripheral circulation, but insufficient to cause them to have a very prolonged circulation time. In some embodiments, PEGylation is applied to give increased local efficacy to the lung tissue with reduced potential for systemic side effects for the covalently modified peptides and/or proteins described herein. In some of such embodiments, PEG chains in the range from about 750 to about 1500 Da are referred collectively as “PEG1K.”

[0791] In addition, other polymers may be used in conjunction with the compounds of described herein in order to optimize their physical properties. For example poly(2-ethyl 2-oxazoline) conjugates have variable hydrophobicity and sufficient size to enhance duration of action (Mero, A., et al. (2008) J Control Release 125: 87-95). Linkage of such a polymer to a saccharide yields a class of surfactant suitable for use in modification of peptides and/o^{r} proteins described herein.

[0792] Polyethylene glycol chains are functionalized to allow their conjugation to reactive groups on the peptide and/or protein chain. Typical functional groups allow reaction with amino, carboxyl or sulifhydryl groups on the peptide through the corresponding carboxyl, amino or maleimido groups (and the like) on the polyethylene glycol chain. In an embodiment, PEG comprises a C₁₀-C₃₀₀₀ chain. In another embodiment, PEG has a molecular weight above 40,000 Daltons. In yet another embodiment, PEG has a molecular weight below 10,000 Daltons. PEG as a protein modification is well known in the art and its use is described, for example, in U.S. Pat. Nos. 4,640,835; 4,496,689; 4,301,144; 4,670,417; 4,791,192; and 4,179,337.

[0793] A non-traditional type of PEG chain is modified to be amphiphilic in nature. That is it has both the hydrophilic PEG structure but is modified to contain hydrophobic regions such as fatty acid esters and other hydrophobic components. See for example (Miller, M. A., et al. (2006) Bioconjug Chem 17: 267-274); Ekwuribe, et al. U.S. Pat. No. 6,309,633; Ekwuribe, et al. U.S. Pat. No. 6,815,530; Ekwuribe, et al. U.S. Pat. No. 6,835,802). Although these amphiphilic PEG conjugates to proteins were originally developed to increase oral bioavailability they were relatively ineffective in this role. However the use of such amphiphilic PEG conjugates with amphipathic peptides will give significantly prolonged residence in the lung to extend the useful biological activity of these pharmaceuticals. The preferred PEG chains are in the molecular weight range of 500 to 3000 Da. Detailed descriptions of the methods of synthesis of these conjugates is given in the references above, the full content of which is incorporated herein.

[0794] A PEG entity itself does not have a functional group to be attached to a target molecular, such as a peptide. Therefore, to create PEG attachment, a PEG entity must be functionalized first, then a functionalized attachment is used to attach the PEG entity to a target molecule, such as a peptide (Greenwald, R. B., et al. (2003) Adv Drug Deliv Rev 55: 217-250, Veronese, F. M. and Pasut, G. (2005) Drug Discov Today 10: 1451-1458, Roberts, M J., et al. (2002) Adv Drug Deliv Rev 54: 459-476). In one embodiment, site-specific PEGylation can be achieved through Cys substitution on a peptide nmolecule. The target peptide can be synthesized by solid phase synthesis, recombinant means, or other means, as described herein.

[0795] Thus in some embodiments, a peptide product described herein comprises a Lys or other reactive residue modified with an alkyl glycoside and specific PEGylation on at least one Cys residue, a Lys residue or other reactive amino acid residue elsewhere in the molecule.

[0796] In another embodiment, a Lys or other residue with a nucleophilic side chain may be used for incorporation of the PEG residue. This may be accomplished through the use of an amide or carbamate linkage to a PEG-carboxyl or PEG-carbonate chain. See for example as described (Veronese, F. M. and Pasut, G. (2005) Drug Discov Today 10: 1451-1458). An alternative approach is to modify the Lys side chain amino function through attachment of an SH containing residue, such as mercaptoacetyl, mercaptopropionyl (CO—CH₂—CH₂—CH₂—SH), and the like. Alternatively the PEG chain may be incorporated at the C-Terminus as an amide during the course of the synthesis. Additional methods for attaching PEG chains utilize reaction with the side chains of His and Trp. Other similar methods of modifying the peptide chain to allow attachment of a PEG chain are known in the art and are incorporated herein by reference (Roberts, M J., et al. (2002) Adv Drug Deliv Rev 54: 459-476).

### Formulations

[0797] In one embodiment, the covalently modified peptides or proteins as disclosed herein are provided in a formulation that further reduces, prevents, or lessens peptide and/or protein association or aggregation in the composition, for example, reduces peptide and/or protein self-association or self-aggregation, or reduces association or aggregation with other peptides or proteins when administered to the subject.

[0798] Self-Association at high protein concentration is problematic in therapeutic formulations. For example, self-association increases the viscosity of a concentrated monoclonal antibody in aqueous solution. Concentrated insulin preparations are inactivated by self aggregation. These self associating protein interactions, particularly at high protein concentration, reduce, modulate or obliterate biological activity of many therapeutics (Clodfelter, D. K., et al. (1998) Pharm Res 15 254-262). Therapeutic proteins formulated at high concentrations for delivery by injection or other means can be physically unstable or become insoluble as a result of these protein interactions.

[0799] A significant challenge in the preparation of peptide and protein formulations is to develop manufacturable and stable dosage forms. Physical stability properties, critical for processing and handling, are often poorly characterized and difficult to predict. A variety of physical instability phenomena are encountered such as association, aggregation, crystallization and precipitation, as determined by protein interaction and solubility properties. This results in significant manufacturing, stability, analytical, and delivery challenges. Development of formulations for peptide and protein drugs requiring high dosing (on the order of mg/kg) are required in many clinical situations. For example, using the SC route, approximately <1.5 mL is the allowable administration volume. This may require >100 mg/ml protein concentrations to achieve adequate dosing. Similar considerations exist in developing a high-concentration lyophilized formulation for monoclonal antibodies. In general, higher protein concentrations permit smaller injection volume to be used which is very important for patient comfort, convenience, and compliance. The surfactant-modified compounds described herein are designed to minimize such aggregation events and may be further facilitated through the use of small amounts of surfactants as herein described.

[0800] Because injection is an uncomfortable mode of administration for many people, other means of administering peptide therapeutics have been sought. Certain peptide and protein therapeutics may be administered, for example, by intranasal, buccal, oral, vaginal, inhalation, or other transmucosal administration. Examples are nafarelin (Synarel( ) and calcitonin which are administered as commercial nasal spray formulations. The covalently modified peptides and/or proteins described herein are designed to facilitate such transmucosal administration and such formulations may be further facilitated through the use of small amounts of surfactants as described herein.

[0801] Typical formulation parameters include selection of optimum solution pH, buffer, and stabilizing excipients. Additionally, lyophilized cake reconstitution is important for lyophilized or powdered formulations. A further and significant problem comprises changes in viscosity of the protein formulation upon self-association. Changes in viscosity can significantly alter delivery properties e.g., in spray (aerosol) delivery for intranasal, pulmonary, or oral cavity sprays. Furthermore, increased viscosity can make injection delivery by syringe or iv line more difficult or impossible.

[0802] Many attempts to stabilize and maintain the integrity and physiological activity of peptides have been reported. Some attempts have produced stabilization against thermal denaturation and aggregation, particularly for insulin pump systems. Polymeric surfactants are described (Thurow, H. and Geisen. K. (1984) Diabetologia 27: 212-218; Chawla, A. S., et al. (1985) Diabetes 34: 420-424). The stabilization of insulin by these compounds was believed to be of a steric nature. Among other systems used are saccharides (Arakawa, T. and Timasheff, S. N. (1982) Biochemistry 21: 6536-6544), osmolytes, such as amino acids (Arakawa, T. and Timasheff, S. N. (1985) Biophys J 47: 411-414), and water structure breakers, such as urea (Sato, S., et al. (1983) J Pharm Sci 72: 228-232). These compounds exert their action by modulating the intramolecular hydrophobic interaction of the protein or peptide.

[0803] Various peptides, peptides, or proteins are described herein and may be modified with any of the covalently bound surfactant reagents described herein. Advantageously, the peptide modifications described herein comprise covalent attachment of a surfactant that comprises both hydrophilic (e.g. saccharide) and hydrophobic (e.g. alkyl chain) groups, thereby allowing for stabilization of the peptide in physiological conditions. In some embodiments, covalent linkage of a moiety comprising a hydrophilic group and hydrophobic group (e.g. a glycoside surfactant) to a peptide, and/or protein described herein eliminates the need for modifying the amino acid sequence of the peptide, and/or protein to enhance stability (e.g., reduce aggregation).

[0804] In some embodiments, the formulations comprise at least one drug comprising a peptide modified with a surfactant derived reagent described herein and in formulation additionally may be associated with a surfactant, wherein the surfactant is further comprised of, for example, a saccharide, an alkyl glycoside, or other excipient and can be administered in a format selected from the group consisting of a drop, a spray, an aerosol, a lyophilizate, a spray dried product, an injectable, and a sustained release format. The spray and the aerosol can be achieved through use of the appropriate dispenser and may be administered by intranasal, transbuccal, inhalation or other transmucosal route. The lyophilizate may contain other compounds such as mannitol, saccharides, submicron anhydrous a-lactose, gelatin, biocompatible gels or polymers. The sustained release format can be an ocular insert, erodible microparticulates, hydrolysable polymers, swelling mucoadhesive particulates, pH sensitive microparticulates, nanoparticles/latex systems, ion-exchange resins and other polymeric gels and implants (Ocusert, Alza Corp., California; Joshi, A., S. Ping and K. J. Himmeistein, Patent Application WO 91/19481). Significant oral bioavailability is also achievable.

[0805] The peptide and protein modifications described herein mitigate and, in some cases, may eliminate the need for organic solvents. Trehalose, lactose, and mannitol and other saccharides have been used to prevent aggregation. Aggregation of an anti-TgE humanized monoclonal antibody was minimized by formulation with trehalose at or above a molar ratio in the range of 300:1 to 500:1 (excipient:protein). However, the powders were excessively cohesive and unsuitable for aerosol administration or exhibited unwanted protein glycation during storage (Andya, J. D., et al. (1999) Pharm Res 16: 350-358). Each of the additives discovered have limitations as additives to therapeutics including xenobiotic metabolism, irritation or toxicity, or high cost. Contemplated for use with the covalently modified peptides and/or proteins described herein are excipients that are effective, non-irritating and non-toxic, do not require xenobiotic metabolism since they are comprised of the natural sugars, fatty acids, or long chain alcohols, and which may also be used to minimize aggregation in aqueous solutions or upon aqueous reconstitution of dried peptide and/or protein formulations in situ by physiologic aqueous reconstitution by aqueous body fluids such as plasma or saliva.

[0806] Other formulation components could include buffers and physiological salts, non-toxic protease inhibitors such as aprotinin and soybean trypsin inhibitor, alpha-1-antitrypsin, and protease-inactivating monoclonal antibodies, among others. Buffers could include organics such as acetate, citrate, gluconate, fumarate, malate, polylysine, polyglutamate, chitosan, dextran -88R-sulfate, etc. or inorganics such as phosphate, and sulfate. Such formulations may additionally contain small concentrations of bacteriostatic agents like benzyl alcohol, and the like.

[0807] Formulations suitable for intranasal administration also comprise solutions or suspensions of the modified peptides and/or protein products described herein in an acceptable evaporating solvents such as hydrofluoroalkanes. Such formulations are suitable for administration from metered dose inhalers (MDI) and have advantages of lack of movement from site of administration, low irritation and absence of need for sterilization. Such formulations may also contain acceptable excipients or bulking agents such as submicron anhydrous α-lactose.

[0808] In yet another aspect, the covalently modified peptides and/or proteins described herein exhibit increased shelf-life. As used herein, the phrase “shelf life” is broadly described as the length of time a product may be stored without becoming unsuitable for use or consumption. The “shelf life” of the composition described herein, can also indicate the length of time that corresponds to a tolerable loss in quality of the composition. The compositional shelf life as used herein is distinguished from an expiration date; “shelf life” relates to the quality of the composition described herein, whereas “expiration date” relates more to manufacturing and testing requirements of the composition. For example, a composition that has passed its “expiration date” may still be safe and effective, but optimal quality is no longer guaranteed by the manufacturer.

### Dosing

[0809] The covalently modified peptides and/or proteins described herein may be administered in any amount to impart beneficial therapeutic effect in a number of disease states. In some embodiments, covalently modified peptides and/or proteins described herein are useful in the treatment of inflammation. In an embodiment, compounds presented herein impart beneficial activity in the modulation of post-operative or chronic pain. In an embodiment, the peptides are administered to a patient at concentrations higher or lower than that of other forms of treatment which modulate pain. In yet another embodiment, the peptides are administered with other compounds to produce synergistic therapeutic effects.

[0810] Representative delivery regimens include oral, transmucosal administration, parenteral (including subcutaneous, intraperitoneal, intramuscular and intravenous injection), rectal, buccal (including sublingual), transdermal, inhalation, ocular and transmucosal (including intranasal) modes of administration. An attractive and widely used method for delivery of peptides entails subcutaneous injection of a controlled-release injectable formulation. In some embodiments, covalently modified peptides and/or proteins described herein are useful for subcutaneous, intranasal and inhalation administration. Moreover, depending on the condition being treated, these therapeutic compositions are administered systemically or locally. Techniques for formulation and administration may be found in the latest edition of “Remington's Pharmaceutical Sciences” (Mack Publishing Co, Easton Pa.).

[0811] The selection of the exact dose and composition and the most appropriate delivery regimen will be influenced by, inter alia, the pharmacological properties of the selected peptide, the nature and severity of the condition being treated, and the physical condition and mental acuity of the recipient. Additionally, the route of administration will result in differential amounts of absorbed material. Bioavailabilities for administration of peptides through different routes are particularly variable, with amounts from less than 1% to near 100% being seen. Typically, bioavailability from routes other than intravenous, intraperitoneal or subcutaneous injection are 50% or less.

[0812] In general, covalently modified peptides and/or proteins described herein, or salts thereof, are administered in amounts between about 0.1 and 1000 μg/kg body weight per day, or between about 0.1 to about 100 μg/kg body weight per day, by subcutaneous injection. For a 50 kg human female subject, the daily dose of active ingredient is from about 5 to about 5000 μg, or from about 5 to about 5000 μg by subcutaneous injection. Different doses will be needed, depending on the route of administration, the compound potency, the pharmacokinetic profile and the applicable bioavailability observed. By inhalation, the daily dose is from 1000 to about 20,000 μg, twice daily. In other mammals, such as horses, dogs, and cattle, higher doses may be required. This dosage may be delivered in a conventional pharmaceutical composition by a single administration, by multiple applications, or via controlled release, as needed to achieve the most effective results.

[0813] Pharmaceutically acceptable salts retain the desired biological activity of the parent peptide without toxic side effects. Examples of such salts are (a) acid addition salts formed with inorganic acids, for example hydrochloric acid, hydrobromic acid, sulfuric acid, phosphoric acid, nitric acid and the like; and salts formed with organic acids such as, for example, acetic acid, trifluoroacetic acid, tartaric acid, succinic acid, maleic acid, fumaric acid, gluconic acid, citric acid, malic acid, ascorbic acid, benzoic acid, tannic acid, pamoic acid, alginic acid, polyglutamic acid, naphthalenesulfonic acids, naphthalene disulfonic acids, polygalacturonic acid and the like; (b) base addition salts or complexes formed with polyvalent metal cations such as zinc, calcium, bismuth, barium, magnesium, aluminum, copper, cobalt, nickel, cadmium, and the like; or with an organic cation formed from N,N-dibenzylethylenediamine or ethylenediamine; or (c) combinations of (a) and (b), e.g., a zinc tannate salt and the like.

[0814] Also contemplated, in some embodiments, are pharmaceutical compositions comprising as an active ingredient covalently modified peptides and/or proteins described herein, or pharmaceutically acceptable salt thereof, in admixture with a pharmaceutically acceptable, non-toxic carrier. As mentioned above, such compositions may be prepared for parenteral (subcutaneous, intramuscular or intravenous) administration, particularly in the form of liquid solutions or suspensions; for oral or buccal administration, particularly in the form of tablets or capsules; for intranasal administration, particularly in the form of powders, nasal drops, evaporating solutions or aerosols; for inhalation, particularly in the form of liquid solutions or dry powders with excipients, defined broadly; and for rectal or transdermal administration.

[0815] The compositions may conveniently be administered in unit dosage form and may be prepared by any of the methods well-known in the pharmaceutical art, for example as described in Remington's Pharmaceutical Sciences, 17th ed,, Mack Publishing Company, Easton, Pa., (1985), incorporated herein by reference. Formulations for parenteral administration may contain as excipients sterile water or saline, alkylene glycols such as propylene glycol, polyalkylene glycols such as polyethylene glycol, saccharides, oils of vegetable origin, hydrogenated naphthalenes, serum albumin nanoparticles (as used in Abraxane™, American Pharmaceutical Partners, Inc. Schaumburg IL), and the like. For oral administration, the formulation can be enhanced by the addition of bile salts or acylcarnitines. Formulations for nasal administration may be solid or solutions in evaporating solvents such as hydrofluorocarbons, and may contain excipients for stabilization, for example, saccharides, surfactants, submicron anhydrous a-lactose or dextran, or may be aqueous or oily solutions for use in the form of nasal drops or metered spray. For buccal administration typical excipients include sugars, calcium stearate, magnesium stearate, pregelatinated starch, and the like,

[0816] When formulated for nasal administration, the absorption across the nasal mucous membrane may be further enhanced by surfactants, such as for example, glycocholic acid, cholic acid, taurocholic acid, ethocholic acid, deoxycholic acid, chenodeoxycholic acid, dehydrocholic acid, glycodeoxycholic acid, cyclodextrins and the like in an amount in the range between about 0.1 and 15 weight percent, between about 0.5 and 4 weight percent, or about 2 weight percent. An additional class of absorption enhancers reported to exhibit greater efficacy with decreased irritation is the class of alkyl maltosides, such as tetradecyimaitoside (Arnold, J. J., et al. (2004) J Pharm Sci 93: 2205-2213, Ahsan, F,, et al. (2001) Pharm Res 18: 1742-174:6) and references therein, all of which are hereby incorporated by reference.

[0817] When formulated for delivery by inhalation, a number of formulations offer advantages. Adsorption of the active peptide to readily dispersed solids such as diketopiperazines (for example Technosphere particles; (Pfutzner, A. and Forst, T. (2005) Expert Opin Drug Deliv 2: 1097-1106) or similar structures gives a formulation which results in a rapid initial uptake of the therapeutic agent. Lyophilized powders, especially glassy particles, containing the active peptide and an excipient are useful for delivery to the lung with good bioavailability, for example, see Exubera® (inhaled insulin by Pfizer and Aventis Pharmaceuticals Inc.). Additional systems for delivery of peptides by inhalation are described (Mandal, T.K., Arn. J. Health Syst. Pharm. 62: 1359-64 (2005)).

[0818] Delivery of covalently modified peptides and/or proteins described herein to a subject over prolonged periods of time, for example, for periods of one week to one year, may be accomplished by a single administration of a controlled release system containing sufficient active ingredient for the desired release period. Various controlled release systems, such as monolithic or reservoir-type microcapsules, depot implants, polymeric hydrogels, osmotic pumps, vesicles, micelles, liposornes, transdermal patches, iontophoretic devices and alternative injectable dosage forms may be utilized for this purpose. Controlled release excipients have also been developed for twice weekly or weekly administrations, for example, a protected graft copolymer system (Castillo, G. M., et al. (2012) Pharm Res 29: 306-18) can be used for hydrophobic or hydrophobically modified peptides such as those of the invention. Localization at the site to which delivery of the active ingredient is desired is an additional feature of some controlled release devices, which may prove beneficial in the treatment of certain disorders.

[0819] One form of controlled release formulation contains the peptide or its salt dispersed or encapsulated in a slowly degrading, non-toxic, non-antigenic polymer such as copoly(lactic/glycolic) acid, as described in the pioneering work of Kent, Lewis, Sanders, and Tice, U.S. Pat. No. 4,675,189, incorporated by reference herein. The compounds, or their salts, may also be formulated in cholesterol or other lipid matrix pellets, or silastomer matrix implants. Additional slow release, depot implant or injectable formulations will be apparent to the skilled artisan. See, for example, Sustained and Controlled Release Drug Delivery Systems, J. R. Robinson ed., Marcel Dekker, Inc., New York, 1978, and R. W. Baker, Controlled Release of Biologically Active Agents, John Wiley & Sons, New York, 1987.

[0820] An additional form of controlled-release formulation comprises a solution of a biodegradable polymer, such as copoly(lactic/glycolic acid) or block copolymers of lactic acid and PEG, is bioacceptable solvent, which is injected subcutaneously or intramuscularly to achieve a depot formulation. Mixing of the peptides described herein with such a polymeric formulation is suitable to achieve very long duration of action formulations.

[0821] As used herein, “therapeutically effective amount” is interchangeable with “effective amount” for purposes herein, and is determined by such considerations as are known in the art. The amount must be effective to achieve a desired drug-mediated effect in the treated subjects suffering from the disease thereof. A therapeutically effective amount also includes, but is not limited to, appropriate measures selected by those skilled in the art, for example, improved survival rate, more rapid recovery, or amelioration, improvement or elimination of symptoms, or other acceptable biomarkers or surrogate markers.

[0822] It will be understood, however, that the specific(dose level and frequency of dosage for any particular subject in need of treatment may be varied and will depend upon a variety of factors including the activity of the specific compound employed, the metabolic stability and duration of action of that compound, the age, body weight, general health, sex, diet, mode and time of administration, rate of excretion, drug combination, the severity of the particular condition, and the host undergoing therapy.

[0823] The dosing method(s) includes all aspects of the compositions described herein including but not limited to compositions which reduce or eliminate imnunogenicity of peptide and/or protein drugs, are non-irritating, have anti-bacterial or anti-fungal activity, have increased stability or bioavailability of a drug, decrease the bioavailability variance of that drug, avoid first pass liver clearance and reduce or eliminate any adverse effects. As used herein, the term “inmmunogenicity” is the ability of a particular substance or composition or agent to provoke an immunological response. The immunogenicity of the covalently modified peptides and/or proteins described herein is confirmed by methods known in the art.

[0824] All publications and patent applications mentioned in this specification are herein incorporated by reference to the same extent as if each independent publication or patent application is specifically and individually indicated to be incorporated by reference.

[0825] The covalently modified peptides and/or proteins described herein and the reagents for the synthesis thereof are more particularly described in the following examples which are intended as illustrative only since numerous modifications and variations therein will be apparent to those of ordinary skill in the art.

### EXAMPLES

### Example 1: Reagents—N-ε-Fmoc, N-ε-(1-octyl β-D-glucuronide-6-yl)-L-Lysine

[0826] In an oven-dried 250 mL Erlenmeyer flask is placed 1-octyl β-D-glucuronic acid (Carbosynth Ltd., 3.06 g, 10 mmol), 50 mL anhydrous DMF, and anhydrous 1-hydroxybenzotriazole (1.62 g, 12 mmol). A chilled (4°) solution of N,N′-dicyclohexylcarbodiimide (2.48 g, 12 mmol) in 50 mL of DMF is added, with stirring, and the reaction is allowed to proceed for 5 min. The copious white precipitate of N, N′-dicyclohexylurea is filtered on a fritted glass funnel and the filtrate is added to a solution of N-α-Fmoc-L-lysine (3.68 g, 10 mmol) in 25 ml anhydrous DMF. The reaction is allowed to proceed for 25 min with warming to room temp or until the ninhydrin color is very faint. The reaction mixture is filtered, stripped to dryness and crystallized from MeOH/Et₂O by dissolution in MeOH and slow dilution to the cloud point with Et₂O, followed by refrigeration. Further purification can be achieved by silica gel chromatography using a solvent gradient from EtOAc to EtOAc/EtOH/AcOH.

[0827] In a similar manner, but substituting N-α-Boc-L-lysine is obtained N-α-Boc,N-ε-(1-octyl β-D-glucuronide-6-yl)-L-lysine, suitable for N-terminal incorporation and cleavage to a free N-Terminus. In a similar manner, but substituting N-α,-Ac-L-lysine is obtained N-α-Ac,N-ε-(1-octyl β-D-glucuronide-6-yl)-L-lysine, suitable for incorporation at the N-terminus of a peptide with a blocked N-terminus. In a similar manner, but substituting the appropriate amount of N-α-Fmoc-L-ornithine is obtained N-α-Fmoc,N-6-(1-octyl -D-glucuronide-6-yl)-L-ornithine. In a similar manner but substituting other N-mono-protected diamino acids one obtains the corresponding reagents. Alternatively, use of a transient Me-Si ester protecting group during the coupling and without preactivation of the 1-octyl β-D-glucuronic acid provides a facile route to the formation of the reagents. The transient Me₃Si ester is produced by reaction of the Fmoc-Lys-OH with an equimolar amount of N,O-bis(trimethylsilyl)acetamide in dichloromethane (CH₂Cl₂). The organic layer contains the desired reagent as a solution in CH₂Cl₂ ready for coupling with the 1-alkyl glucoronide as above. The filtered reaction mixture is washed with aqueous NaHSO₄ to hydrolyze the Me₃Si ester, dried over MgSO₄ and solvent is removed.

[0828] Similarly, but using peracetyl or perbenzoyl 1-octyl -D-glucuronic acid one obtains the Ac, or Bz protected form of the reagents (e.g. 2,3,4-trisacetyl 1-octyl β-D-glucuronic acid, and the like, formed by treatment with Ac₂O). Such reagents have increased stability during acid cleavage from the resin and are used when instability during deprotection is detected, see (Kihlberg, J., et al. (1997) Methods Enzymol 289: 221-245) and references therein. Final deprotection of such products is carried out by base-catalyzed transesterification after cleavage, by use of MeOH/NH₃, MeOH/NaOMe, MeOH/NH,.NH₂, as described above.

### Example 2: Synthetic Peptide Analogs

[0829] In general, peptide synthesis methods involve the sequential addition of protected amino acids to a growing peptide chain. Normally, either the amino or carboxyl group of the first amino acid and any reactive side chain group are protected. This protected amino acid is then either attached to an inert solid support, or utilized in solution, and the next amino acid in the sequence, also suitably protected, is added under conditions amenable to formation of the amide linkage. After all the desired amino acids have been linked in the proper sequence, protecting groups and any solid support are removed to afford the crude peptide. The peptide is desalted and purified chromatographically.

[0830] A preferred method of preparing the analogs of the physiologically active truncated peptides, having fewer than about fifty amino acids, involves solid phase peptide synthesis. In this method the α-amino (Nα) functions and any reactive side chains are protected by acid- or base-sensitive groups. The protecting group should be stable to the conditions of peptide linkage formation, while being readily removable without affecting the extant peptide chain. Suitable α-amino protecting groups include, but are not limited to t-butyloxycarbonyl (Boc), benzyloxycarbonyl (Cbz), o-chlorobenzyloxycarbonyl, biphenylisopropyloxycarbonyl, t-amyloxycarbonyl (Amoc), isobornyloxycarbonyl, α,α-dimethyl-3,5-dimethoxybenzyloxy-carbonyl, o-nitrophenylsulfenyl, 2-cyano-t-butoxycarbonyl, 9-fiuorenyi-methoxycarbonyl (Fmoc) and the like, preferably Boc or more preferably, Frmoc. Suitable side chain protecting groups include, but are not limited to: acetyl, benzyl (Bzl), benzyloxymethyl (Bom), Boc, t-butyl, o-bromobenzyloxycarbonyl, t-butyl, t-butyldimethylsilyl, 2-chlorobenzyl (C1-z), 2,6-dichlorobenzyl, cyclohexyl, cyclopentyl, isopropyl, pivalyl, tetrahydropyran-2-yl, tosyl (Tos), 2,2,4,6;7-pentamethyldihydrobenzofuran-5-suIfonyl (Pbf), trimethytsilyl and trityl. A preferred Nα-protecting group for synthesis of the compounds is the Fmoc group. Preferred side chain protecting groups are O-t-Butyl group for Glu, Tyr, Thr, Asp and Ser; Boc group for Lys and Trp side chains; Pbf group for Arg; Trt group for Asn, Gln, and His. For selective modification of a Lys residue, orthogonal protection with a protecting group not removed by reagents that cleave the Fmoc or t-butyl based protecting groups is preferred. Preferred examples for modification of the Lys side chain include, but are not limited to, those removed by hydrazine but not piperidine; for example 1-(4,4-dimethyl-2,6-dioxocyclohex-1-ylidene)-3-methylbutyl (ivDde) or 1-(4,4-dimethyl-2,6-dioxocyclohex-1-ylidene)ethyl (Dde) and allyloxycarbonyl (Alloc).

[0831] The Fmoc-Lys(ivDde) or Fimoc-Lys(Dde) protecting group scheme is preferred in cases where side chain lactam formation is desired (Houston, M. E., Jr., et al. (1995) J Pept Sci 1: 274-282: Murage, E N., et al. (2010) J Med Chem), since in this case Fmoc-Glu(O-Allyl) and Fmoc-Lys(Alloc) can be incorporated and used to provide trausient protection, then deprotected for lactam formation while the Lys(Dde) protecting group remains for later removal and reaction with the functionalized surfactant. The side chain lactam between acidic and basic residue (e.g. Glu and Lys) is carried out after removal of the allyl-based protection by activation of the carboxyl side chain function with N,N-diisopropylcarbodiimide (DIC)/1-hydroxybenzotriazole (HOBt) or 2-(1H-benzotriazole-1-yl)-1,1,3,3-tetramethylaminium hexafluorophosphate (HBTf)/ N,N-di-isopropylethylamine (DIEA), using standard protocols well known to the art.

[0832] In solid phase synthesis, the C-terminal amino acid is first attached to a suitable resin support. Suitable resin supports are those materials which are inert to the reagents and reaction conditions of the stepwise condensation and deprotection reactions, as well as being insoluble in the media used. Examples of commercially available resins include styrene/divinylbenzene resins modified with a reactive group, e.g., chloromethylated co-poly-(styrene-divinylbenzene), hydroxymethylated co-poly-(styrene-divinylbenzene), and the like. Benzylated, hydroxymethylated phenylacetainidomethyl (PAM) resin and hydroxymethyilphenoxyacetylamidomethyl (TIMPA) are preferred for the preparation of peptide C-terminal acids. When the C-terminus of the compound is an amide, preferred resins are p-methylbenzhydrylamino-co-poly(styrene-divinyl-benzene) resin and 2,4-dimethoxybenzhydrylamino-based resin (“Rink amide”), and the like. An especially preferred support for the synthesis of larger peptides are commercially available resins containing PEG sequences grafted onto other polymeric matrices, such as the Rink Amide-PEG and PAL-PEG-PS resins (Applied Biosystems) or similar resins designed for peptide amide synthesis using the Fmoc protocol. Thus in certain cases it is desirable to have an amide linkage to a PEG chain. It those cases it is convenient to link an N-Fmoc-amino-PEG-carboxylic acid to the amide forming resin above (e.g. Rink amide resin and the like). The first amino acid of the chain can be coupled as an N-Fmoc-amino acid to the amino function of the PEG chain. Final deprotection will yield the desired Peptide-NH-PEG-CO—NH₂ product.

[0833] Attachment to the PAM or HMPA resin may be accomplished by reaction of the Na protected amino acid, for example the Boc-amino acid, as its ammonium, cesium, triethylammonium, 1,5-diazabicyclo-[5.4.0]undec-5-ene, tetramethylammonium, or similar salt in ethanol, acetonitrile, N,N-dimethylformamide (DMF), and the like, preferably the cesium salt in DMF, with the resin at an elevated temperature, for example between about 40° and 60° C., preferably about 50° C., for from about 12 to 72 hours, preferably about 48 hours. This will eventually yield the peptide acid product following acid cleavage or an amide following aminolysis.

[0834] The Nα-Boc-amino acid may be attached to the benzhydrylamine resin by means of, for example, a (DIC)/HOBt mediated coupling for from about 2 to about 24 hours, preferably about 2 hours at a temperature of between about 10° and 50° C., preferably 25° C. in a solvent such as C₂-1C₁₂ or DMF, preferably CH₂Cl₂.

[0835] For Boc-based protocols, the successive coupling of protected amino acids may be carried out by methods well known in the art, typically in an automated peptide synthesizer. Following neutralization with triethylarnine, DIEA, N-methylmorpholine (NMM), collidine, or similar base, each protected amino acid is introduced in approximately about 1.5 to 2.5 fold molar excess and the coupling carried out in an inert, nonaqueous, polar solvent such as CH₂Cb, DMF, N-methylpyrrolidone (N:MP). N,N-dimethylacetamide (DMA), or mixtures thereof, preferably in dichlorornethane at ambient temperature. For Fmoc-based protocols no acid is used for deprotection but a base, preferably DTEA or NMM, is usually incorporated into the coupling mixture. Couplings are typically done in DMF, NMP, DMA or mixed solvents, preferably DMF. Representative coupling agents are N,N-dicyciohexylcarbodiimide (DCC), N,N′-diisopropyl-carbodiimide (DIC) or other carbodiimide, either alone or in the presence of HOBt, O-acyl ureas, benzotriazol-1-yl-oxytris(pyrrolidino)phosphonium hexafluorophosphate (PyBop), N-hydroxysuccinimide, other N-hydroxyimides, or oximes. Alternatively, protected amino acid active esters (e.g. p-nitrophenyl, pentafluorophenyl and the like) or symmetrical anhydrides may be used. Preferred coupling agents are of the aminium/uroniurn (alternative nomenclatures used by suppliers) class such as HBTLU, O-(7-azabenzotriazole-1-yl)-1,1,3,3-tetramethyluronium hexafluorophosphate (HATU), 2-(6-Chloro-III-benzotriazole-1-yl)-1,1,3,3-tetramethylaminium hexafluorophosphate (HCTU), and the like.

[0836] A preferred method of attachment to the Fmoc-PAL-PEG-PS resin may be accomplished by deprotection of the resin linker with 20% piperidine in DMF, followed by reaction of the N-u-Fmoc protected amino acid, about a 5 fold molar excess of the N-αr-Fmoc-amino acid, using HBTt: di-isopropylethylamine (DIEA) (1:2) in DMF in a microwave-assisted peptide synthesizer with a 5 min, 75° max coupling cycle.

[0837] Certain analogs of the specification contain a discrete PEG linker (dPEG) at the C-terminus. Such linkers are short chains of polyethylene with an amino terminus and a carboxyl terminus. Thus they are essentially unnatural amino acids and are treated similarly to the other amino acids for synthesis. For example, Fmoc-amidooxy-dPEG4-acid is commercially available from Quanta Biodesign (#10213) and it attached to the Rink or HMPA resin at the first step of the synthesis in a manner similar to that used for the N-Fmoc or N-Boc amino acids described above. Deprotection with the standard strong acid conditions provides the corresponding short dPEG C-terrminally modified peptide with the corresponding acid or amide C-terminus.

[0838] For this Fmoc-based protocol in the microwave-assisted peptide synthesizer, the N-α-Fmoc amino acid protecting groups are removed with 20% piperidine in DMF containing 0.1 M 1-hydroxybeuzotriazole (HOBt), in a double deprotection protocol for 30 see and then for 3 min with a temperature maxmum set at 75° C. HOBt is added to the deprotection solution to reduce aspartimide formation. Coupling of the next amino acid then employs a five-fold molar excess using HBTU:DIEA (1:2) with a 5 min, 750 max, double-coupling cycle.

[0839] At the end of the solid phase synthesis the fully protected peptide is removed from the resin. When the linkage to the resin support is of the benzyl ester type, cleavage may be effected by means of aminolysis with an alkylamine or fluoroalkylamine for peptides with an alkylamide C-terminus, or by ammonolysis with, for example, ammonia/methanol or ammonia/ethanol for peptides with an unsubstituted amide C-terminus, at a temperature between about −10° and 50° C., preferably about 25° C., for between about 12 and 24 hours, preferably about 18 hours. Peptides with a hydroxy C-terminus may be cleaved by HF or other strongly acidic deprotection regimen or by saponification. Alternatively, the peptide may be removed from the resin by transesterification, e.g., with methanol, followed by aminolysis or saponification. The protected peptide may be purified by silica gel or reverse-phase HPLC.

[0840] The side chain protecting groups may be removed from the peptide by treating the aminolysis product with, for example, anhydrous liquid hydrogen fluoride in the presence of anisole or other carbonium ion scavenger, treatment with hydrogen fluoride/pyridine complex, treatment with tris(trifluoroacetyl)boron and trifluoroacetic acid, by reduction with hydrogen and palladium on carbon or polyvinylpyrrolidone, or by reduction with sodium in liquid ammonia, preferably with liquid hydrogen fluoride and anisole at a temperature between about −10° and +10° C., preferably at about 0° C., for between about 15 minutes and 2 hours, preferably about 1.5 hours.

[0841] For peptides on the benzhydrylamine type resins, the resin cleavage and deprotection steps may be combined in a single step utilizing liquid hydrogen fluoride and anisole as described above or preferably through the use of milder cleavage cocktails. For example, for the PAL-PEG-PS resin, a preferred method is through the use of a double deprotection protocol in the microwave-assisted peptide synthesizer using one of the mild cleavage cocktails known in the art, such as TFA/water/tri-iso-propylsilane/3,6-dioxa- 1,8-octanedithiol (DODT) (92.5/2.5/2.5/2.5) for 18 min at 38° C. each time. Cleavage of alkyl glycoside containing materials have shown survival of the alkyl glycoside linkage using protocols with TFA/water ratios in the 9/1 to 19/1 range. A typical cocktail is 94% TFA: 2% EDT; 2% H₂O; 2% TIS. Typically the fully deprotected product is precipitated and washed with cold (−70° to 4° C.) Et₂O, dissolved in deionized water and lyophilized.

[0842] The peptide solution may be desalted (e.g. with BioRad AG-3®, anion exchange resin) and the peptide purified by a sequence of chromatographic steps employing any or all of the following types: ion exchange on a weakly basic resin in the acetate form; hydrophobic adsorption chromatography on underivatized co-poly(styrene-divinylbenzene), e.g. Amberlite®XAD; silica gel adsorption chromatography; ion exchange chromatography on carboxymethylcellulose; partition chromatography, e.g. on Sephadex®G-25; counter-current distribution; supercritical fluid chromatography; or HPLC, especially reversed-phase HPLC on octyl- or octadecylsilylsilica (ODS) bonded phase column packing.

[0843] Also provided herein are processes for preparing covalently modified peptides and/or proteins described herein and pharmaceutically acceptable salts thereof, which processes comprise sequentially condensing protected amino acids on a suitable resin support, removing the protecting groups and resin support, and purifying the product, to afford analogs of the physiologically active truncated homologs and analogs of the covalently modified peptides and/or proteins described herein. In some embodiments, covalently modified peptides and/or proteins described herein incorporate alkyl glycoside modifications as defined above. Another aspect relates to processes for preparing covalently modified peptides and/or proteins described herein and pharmaceutically acceptable salts thereof, which processes comprise the use of microwave-assisted solid phase synthesis-based processes or standard peptide synthesis protocols to sequentially condense protected amino acids on a suitable resin support, removing the protecting groups and resin support, and purifying the product, to afford analogs of the physiologically active peptides, as defined above.

### Example 3. General Oxidation Method for Uronic Acids

[0844] To a solution of 1-dodecyl β-D-glucopyranoside (Carbosynth) [2.0 g, 5.74 mmol]_in 20 mL of acetonitrile and 20 mL of DI water was added (diacetoxyiodo)benzene (Fluka) [4.4 g, 13.7 mmol]and TEMPO (SigmaAldrich) [0.180 g, 1.15 mmol]. The resulting mixture was stirred at room temperature for 20 h. The reaction was followed by mass spectrometry (for example LCQ ESI) and upon completion, the reaction mixture was diluted with water and lyophilized to dryness to give 1.52 g (crude yield 73.1%) of the crude product, 1-dodecyl i-D-glucuronic acid, as a white powder, which was used directly for the solid phase synthesis without further purification. This product was previously prepared by an alternative process using NaOCl as oxidant, as described in the specification, and also has been used for longer alkyl groups. For longer alkyl groups 1,4-dioxane was used instead of acetonitrile and the temperature was raised as high as 30° C. In a similar manner are prepared the desired alkyl saccharide uronic acids used to make the products and reagents described herein.

[0845] In a like manner, but using, for example, the corresponding 1-octyl, 1-decyl, I-undecyl, 1-tetradecyl, 1-hexadecyl, and 1-octadecyl glycosides (purchased from Anatrace, Maumee, OH) were prepared the desired 1-alkyl saccharide uronic acids which were used to make the products and reagents described herein. In a like manner, but using, for example, the corresponding 1-octyl, 1-decyl, I-undecyl, I-tetradecyl, I-hexadecyl, and 1-octadecyl B-D-melibiosides or 3-D-maltosides ( )urchased from Anatrace, Maumee. OH were prepared the desired 1-alkyl disaccharide uronic acids which were used to make the products and reagents described herein.

### Example 4: Preparation of C-Terminal Amide Analogs (EU-A387).

[0846] A sample of Fmoc-His₁-Aib-Gln₃-Gly-Thr-Phe-Thr-Ser-Asp-Bip-Ser-Lys-Tyr-Leu-Glu-Ser-Lys(Alioc )-Rink amide resin (SEQ ID NO: 1124) was prepared by sequential addition of N-alpha-Fmoc protected amino acids as described in Example 1 and deprotected on the Lys-N-epsilon position by incubation with Pd(PPh3)₄ (0.5 eq) and DMBA (20 eq) in DMF/CH₂C2. (1:1) overnight in the dark at room temperature. Following washing by DMF/CH₁₂C₁₂, the Lys side chain was acylated with 1′-dodecyl β3-D-glucuronic acid in DMF/CH₂C₁₂ through the use of DIC/HOBt. Completion of the coupling was checked by ninhydrin and the product was washed extensively with CH₂C3.

[0847] The product resin is submitted to final deprotection and cleavage from the resin by treatment with the cleavage cocktail (94% TFA: 2% EDT; 2% H₂O; 2% TTS) for a period of 240 min at room temperature. The mixture was treated with EtO, to precipitate the product and washed extensively with Et₂O to yield the crude title peptide product after drying in vacuo.

[0848] Purification is carried out in two batches by reversed phase (C18) hplc. The crude peptide was loaded on a 4.1×25 cm hplc column at a flow rate of 15 mL/min (15% organic modifier; acetic acid buffer) and eluted with a gradient from 15-45% buffer B in 60 min at 50° C. The product fraction is lyophilized to yield the title product peptide with a purity 98.03% by analytical hplc (18.6 min; 30-60% CH₃CN in 0.1% TFA)imass spectrometry (M+1 peak=2382.14). In a similar manner were prepared the other analogs of the invention, the characterization of which is illustrated below. The corresponding 1-methyl and 1i-octyl analogs of the title compound are prepared in a similar manner, but using the reagents 1′-methyl B-D-glucuronic acid and 1-octyl B-D-glucuronic acid (Carbosynth). The corresponding 1-decyl, 1-dodecyl, 1-tetradecyl, 1-hexadecyl, 1-octadecyl and 1-eicosyl and higher analogs are prepared using the corresponding monosaccharide and disaccharide uronic acids, prepared as described above. Alternatively, the 1-alkyl glucuronyl, or other uronic acylated analogs, may be prepared by initial purification of the deprotected or partially deprotected peptide followed by acylation by the desired uronic acid reagent.

### Example 5: Preparation of Peptide C-Terminal Acid Analogs.

[0849] A sample of Boc-His(Trt)-Aib-Gln(Trt)-Gly-Thr(tBu)-Phe-Thr(tBu)-Ser(tBu)-Asp(OtBu)-Tyr(tBu)-Ser(tBu)-Lys(Boc)-Tyr(tBu)-Leu-Asp(OtBu)-Glu(O-Allyl)-Gln(Trt)-Ala-Ala-Lys(Alloc)-Glu(0-tBu)-Phe-Ile-Lys(Dde)-Trp(Boc)-Leu-Leu-Gln(Trt)-Thr(tBu)-HMIPA (SEQ ID NO: 1125) resin (started from Fmoc-Thr(tBu)-HMPA) Resin, substitution 0.45mmol/g) was prepared by sequential addition of N-αlpha-Fmoc protected amino acids as described in Example 1. The allyl based side chains on Glu and Lys were deprotected by incubation with Pd(PPh₃)₄(0.5 eq) and DMBA (20 eq) in DMF/CH₂Cl₂ (1:1) overnight in the dark at room temperature. The resin was washed with 0.5% DIEA in DMF (twice), 0.5% sodium diethyldithiocarbamate in DMF (twice) and DMF/CH₂Cl₂ until a light yellow resin was obtained. The side chain lactam linkage was formed by coupling the Glu and Lys with DIC/-HOBT (5 equivalents) in DMF. The reaction was checked for completeness with ninhydrin and recoupled if necessary. Following washing by DMF/CH₂Cl₂, the Lys side chain was deprotected by incubation with 5% hydrazine hydrate in DMF (10 equivalents) twice, in each case for 15 min. Following washing by DMF/CH₂Cl₂ the side chain amino group of the deprotected Lys residue was reacted with 1′-tetradecyl β-D-melibiouronic acid in DMF/CH₂Cl₂ through the use of DIC/HOBt. Completion of the coupling was checked by ninhydrin and the product was washed extensively with CH₂Cl₂. Any couplings which were not complete by ninhydrin were rerun. In general, 10-12 g of peptide product resin was obtained from a 2 mmole synthesis.

[0850] The product resin was submitted to final deprotection and cleavage from the resin by treatment with the cleavage cocktail (94% TFA: 2% EDT; 2% H₂O; 2% TIS) for a period of 240 min at room temperature. The mixture was treated with Et₂O, to precipitate the product and washed extensively with Et₂O to yield the crude title peptide product after drying in vacuo. In general, 5 to 8 g crude product peptide was obtained.

[0851] Purification was carried out in two batches by reversed phase (C18) hplc. The crude peptide (1-1.5g) was loaded on a 4.1x25 cm hplc column at a flow rate of 15 mL/min (15% organic modifier; 0.1% TFA buffer) and eluted with a gradient from 35-55% buffer B in 70 min at room temperature. Repurification of the less pure fractions was done for the fractions with a purity of >70%, The product fraction was lyophilized to yield EU-A1077 with a purity of 98.7% by analytical hplc (10.3 min; 45-75% C-3CN in 0.1% TFA)/mass spectrometry (131767, +3 charged; 1976,13, +2 charged: molecular weight 3950,44). In a similar manner were prepared the other analogs of the invention, the characterization of which is illustrated below.

[0852] The corresponding 1-methyl and 1-octyl analogs of the title compound are prepared in a similar manner, but using the reagents 1′-methyl β-D-glucuronic acid and 1′-octyl β-D-glucuronic acid (Carbosynh). In a like manner, but using the corresponding 1-octyl, 1-decyl, 1-undecyl, 1-tetradecyl, 1-hexadecyl, and 1-octadecyl β-D-glucouronic acids (prepared as described above) were prepared the products of the invention. In a like manner, but using the corresponding 1-octyl, 1-decyl, 1-undecyl, 1-tetradecyl, 1-hexadecyl, and 1-octadecyl β-D-melibiouronic or 1-D-maltouronic (prepared as described above) were prepared the products and reagents described herein. Alternatively, the 1-alkyl glucuronyl, or other uronic acylated analogs, may be prepared by initial purification of the deprotected or partially deprotected peptide followed by acylation by the desired uronic acid reagent. Alternatively, ammonolysis of the 1MPA resin bound intermediate will yield the corresponding amide C-terminus.

[0853] Analysis and characterization was done by -IPLC/mass spectrometry in positive ion mode using the eluent gradients given in the table below.

| Compound | Molecular | Molecular | HPLC | |
|---|---|---|---|---|
| Name | Wt Expected | Wt Found | (min; elution) | |
| EU-A387 | 2379.66 | 2380.14 | 18.6 | [b] |
| EU-A388 | 2393.69 | 2393.74 | 16.0 | [a] |
| EU-A391 | 2317.62 | 2318.26 | 11.2 | [b] |
| EU-A455 | 2988.36 | 2988.00 | 11.5 | [b] |
| EU-A474 | 2570.86 | 2570.54 | 11.3 | [b] |
| EU-A478 | 2459.75 | 2459.74 | 11.1 | [b] |
| EU-A484 | 2544.86 | 2545.06 | 9.6 | [b] |
| EU-A501 | 2904.2 | 2903.34 | 7.9 | [b] |
| EU-A502 | 2776.07 | 2776.14 | 8.0 | [b] |
| EU-A503 | 2704.98 | 2704.40 | 8.0 | [b] |
| EU-A504 | 2548.80 | 2548.00 | 9.1 | [b] |
| EU-A505 | 2392.61 | 2392.40 | 10.5 | [b] |
| EU-A506 | 2305.53 | 2305.06 | 10.7 | [b] |
| EU-A507 | 3763.23 | 3762.66 | 9.0 | [b] |
| EU-A521 | 2303.56 | 2303.60 | 8.2 | [c] |
| EU-A522 | 2315.60 | 2315.60 | 14.2 | [d] |
| EU-A523 | 2615.94 | 2616.00 | 8.1 | [b] |
| EU-A524 | 2459.75 | 2459.74 | 12.7 | [d] |
| EU-A525 | 2459.75 | 2459.06 | 6.0 | [c] |
| EU-A526 | 2473.75 | 2473.60 | 12.7 | [d] |
| EU-A527 | 2390.64 | 2390.40 | 14.6 | [d] |
| EU-A529 | 2546.83 | 2546.80 | 9.5 | [b] |
| EU-A531 | 2546.83 | 2546.80 | 9.5 | [b] |
| EU-A532 | 2559.00 | 2558.66 | 9.6 | [b] |
| EU-A533 | 2560.96 | 2560.66 | 9.5 | [b] |
| EU-A534 | 2544.99 | 2544.94 | 9.7 | [b] |
| EU-A535 | 2573.05 | 2574.00 | 12.0 | [b] |
| EU-A536 | 2602.96 | 2603.46 | 14.3 | [b] |
| EU-A538 | 2516.99 | 2516.40 | 10.3 | [b] |
| EU-A539 | 2657.20 | 2656.80 | 10.8 | [b] |
| EU-A540 | 2685.20 | 2684.94 | 9.8 | [c] |
| EU-A541 | 2713.20 | 2712.80 | 13.0 | [c] |
| EU-A544 | 2631.94 | 2632.26 | 10.8 | [b] |
| EU-A546 | 2687.94 | 2688.80 | 9.1 | [c] |
| EU-A549 | 2388.67 | 2388.66 | 6.3 | [e] |
| EU-A551 | 2444.67 | 2445.20 | 11.4 | [e] |
| EU-A552 | 2472.67 | 2473.14 | 10.7 | [f] |
| EU-A554 | 2560.86 | 2560.40 | 10.3 | [c] |
| EU-A556 | 2616.86 | 2616.40 | 11.7 | [e] |
| EU-A557 | 2644.86 | 2645.74 | 10.4 | [f] |
| EU-A560 | 2570.86 | 2571.06 | 8.3 | [c] |
| EU-A562 | 2626.86 | 2626.66 | 9.9 | [e] |
| EU-A563 | 2654.86 | 2655.06 | 8.7 | [f] |
| EU-A565 | 2542.80 | 2542.54 | 9.5 | [c] |
| EU-A567 | 2598.80 | 2599.06 | 12.0 | [e] |
| EU-A568 | 2626.80 | 2626.54 | 10.1 | [f] |

HPLC gradients in 0.1% TFA
[a] 35 to 65% CH₃CN over 30 min.
[b] 30 to 60% CH₃CN over 20 min.
[c] 35 to 65% CH₃CN over 20 min.
[d] 25 to 55% CH₃CN over 20 min.
[e] 40 to 70% CH₃CN over 20 min.
[f] 45 to 75% CH₃CN over 20 min.
HPLC on Phenomenex Luna C18 5 micron 250 × 4.6 mm.

[0854] Additional compounds synthesized and analyzed as described above are

| Compound | Molecular | Molecular | HPLC | |
|---|---|---|---|---|
| Name | Wt Expected | Wt Found | (min; elution) | |
| EU-A570 | 2656.16 | 2656.00 | 10.4 | [b] |
| EU-A571 | 2684.16 | 2683.34 | 11.2 | [c] |
| EU-A575 | 2670.16 | 2670.94 | 11.8 | [b] |
| EU-A576 | 2698.16 | 2697.20 | 11.2 | [c] |
| EU-A580 | 2668.20 | 2667.20 | 12.3 | [b] |
| EU-A581 | 2696.20 | 2695.46 | 11.1 | [c] |
| EU-A592 | 2724.20 | 2724.58 | 9.9 | [e] |
| EU-A595 | 2682.20 | 2682.40 | 9.7 | [c] |
| EU-A596 | 2710.20 | 2710.46 | 10.4 | [c] |
| EU-A597 | 2738.20 | 2738.18 | 10.9 | [e] |
| EU-A721 | 2461.85 | 2461.74 | 10.3 | [b] |
| EU-A722 | 2475.85 | 2475.34 | 10.8 | [b] |
| EU-A723 | 2459.88 | 2459.86 | 7.7 | [c] |
| EU-A724 | 2473.88 | 2473.34 | 11.1 | [b] |
| EU-A725 | 2471.92 | 2472.00 | 10.8 | [b] |
| EU-A726 | 2557.03 | 2556.80 | 11.0 | [b] |
| EU-A727 | 2485.92 | 2485.74 | 10.9 | [b] |
| EU-A728 | 2513.92 | 2513.86 | 10.6 | [c] |
| EU-A729 | 2541.92 | 2541.86 | 9.7 | [e] |
| EU-A730 | 2569.92 | 2569.74 | 9.4 | [f] |
| EU-A731 | 2425.88 | 2425.32 | 10.6 | [d] |
| EU-A732 | 2476.95 | 2476.40 | 9.4 | [c] |
| EU-A733 | 2381.83 | 2382.02 | 11.4 | [b] |
| EU-A734 | 2616.09 | 2616.18 | 11.4 | [b] |
| EU-A750 | 1611.89 | 1611.56 | 9.4 | [c] |
| EU-A751 | 1625.89 | 1625.35 | 9.7 | [c] |
| EU-A752 | 1709.93 | 1709.41 | 11.7 | [g] |
| EU-A753 | 1637.84 | 1637.46 | 12.5 | [b] |
| EU-A754 | 1651.84 | 1651.18 | 9.9 | [c] |
| EU-A755 | 1711.93 | 1711.46 | 10.3 | [h] |
| EU-A756 | 1671.98 | 1671.37 | 9.8 | [e] |
| EU-A757 | 1770.02 | 1769.17 | 14.9 | [g] |
| EU-A770 | 3333.61 | 3334.65 | 9.5 | [b] |
| EU-A771 | 3678.25 | 3677.96 | 11.3 | [c] |
| EU-A772 | 3762.25 | 3763.35 | 14.9 | [e] |
| EU-A773 | 3790.31 | 3791.31 | 11.1 | [f] |
| EU-A774 | 3475.74 | 3477.15 | 10.5 | [d] |
| EU-A775 | 3820.38 | 3821.52 | 10.4 | [c] |
| EU-A776 | 3904.38 | 3905.76 | 10.2 | [f] |
| EU-A777 | 3932.44 | 3933.69 | 9.7 | [f] |
| EU-A792 | 3793.43 | 3793.52 | 8.9 | [f] |
| EU-A793 | 3821.43 | 3821.60 | 10.8 | [f] |
| EU-A794 | 3849.43 | 3848.78 | 10.5 | [g] |
| EU-A945 | 3777.18 | 3777.54 | 12.2 | [e] |
| EU-A948 | 3861.18 | 3862.14 | 13.0 | [f] |
| EU-A993 | 3759.22 | 3759.00 | 9.3 | [f] |
| EU-A994 | 3787.22 | 3787.44 | 11.4 | [f] |
| EU-A995 | 3815.22 | 3815.52 | 14.5 | [g] |
| EU-A996 | 3843.22 | 3843.12 | 12.3 | [g] |
| EU-A999 | 3935.35 | 3934.66 | 13.4 | [e] |
| EU-A1011 | 3854.21 | 3854.38 | 14.2 | [c] |
| EU-A1017 | 3896.26 | 3895.77 | 12.3 | [c] |
| EU-A1023 | 3921.35 | 3921.15 | 10.5 | [e] |
| EU-A1024 | 3949.42 | 3950.22 | 5.8 | [g] |
| EU-A1025 | 3977.47 | 3976.84 | 7.96 | [g] |
| EU-A1026 | 4005.55 | 4004.64 | 12.8 | [g] |
| EU-A1029 | 3939.31 | 3939.06 | 10.7 | [e] |
| EU-A1032 | 4023.51 | 4025.22 | 13.9 | [f] |
| EU-A1035 | 3840.21 | 3838.21 | 9.8 | [e] |
| EU-A1041 | 3882.26 | 3880.50 | 9.6 | [e] |
| EU-A1044 | 3966.46 | 3965.46 | 12.6 | [f] |
| EU-A1167 | 3731.15 | 3731.42 | 8.9 | [f] |
| EU-A1168 | 3745.15 | 3745.20 | 10.8 | [i] |
| EU-A1173 | 3978.49 | 3977.00 | 12.9 | [f] |
| EU-A1576 | 3922.37 | 3922.08 | 10.2 | [e] |
| EU-A1577 | 3950.44 | 3949.95 | 10.3 | [f] |
| EU-A1581 | 3923.35 | 3921.21 | 13.1 | [j] |
| EU-A1587 | 3949.42 | 3949.92 | 9.6 | [f] |
| EU-A1588 | 3977.47 | 3977.97 | 8.3 | [f] |
| EU-A1589 | 4005.55 | 4005.18 | 9.2 | [g] |
| EU-A1590 | 3922.37 | 3923.01 | 12.5 | [j] |
| EU-A1591 | 3922.33 | 3922.80 | 12.4 | [j] |
| EU-A1592 | 3923.35 | 3921.74 | 13.0 | [j] |
| EU-A1595 | 3914.38 | 3915.45 | 11.5 | [e] |
| EU-A1596 | 3942.43 | 3942.48 | 7.1 | [g] |
| EU-A1598 | 3887.29 | 3886.80 | 12.4 | [j] |
| EU-A1599 | 3888.31 | 3888.00 | 12.5 | [j] |
| EU-A1601 | 4049.52 | 4051.35 | 10.1 | [e] |
| EU-A1602 | 4077.59 | 4075.41 | 12.4 | [n] |
| EU-A1606 | 4050.46 | 4051.77 | 10.4 | [e] |
| EU-A1607 | 4078.53 | 4077.99 | 12.7 | [n] |
| EU-A1611 | 4050.54 | 4051.44 | 10.1 | [e] |
| EU-A1612 | 4078.61 | 4078.86 | 12.3 | [e] |
| EU-A1617 | 4079.55 | 4079.55 | 13.0 | [j] |
| EU-A1620 | 4180.59 | 4181.49 | 11.0 | [e] |
| EU-A1622 | 4208.66 | 4208.31 | 12.9 | [j] |
| EU-A1627 | 4207.64 | 4208.28 | 12.8 | [j] |
| EU-A1634 | 4035.78 | 4037.34 | 13.9 | [e] |
| EU-A1635 | 4063.78 | 4065.54 | 9.5 | [g] |
| EU-A1639 | 4169.54 | 4167.99 | 7.7 | [k] |
| EU-A1645 | 4183.76 | 4182.60 | 13.2 | [e] |
| EU-A1646 | 4211.99 | 4213.32 | 23.5 | [l] |
| EU-A1647 | 4239.74 | 4239.21 | 12.2 | [m] |
| EU-A1651 | 4345.89 | 4345.41 | 10.8 | [o] |
| EU-A1679 | 3704.17 | 3704.85 | 9.0 | [e] |
| EU-A1680 | 3732.17 | 3732.45 | 7.0 | [f] |
| EU-A1681 | 3760.24 | 3761.31 | 8.8 | [f] |
| EU-A1682 | 3788.24 | 3788.52 | 11.9 | [f] |
| EU-A1710 | 3859.32 | 3859.71 | 6.4 | [f] |
| EU-A1711 | 3887.39 | 3888.12 | 8.0 | [f] |
| EU-A1712 | 3915.39 | 3915.72 | 12.1 | [e] |
| EU-A1713 | 3943.39 | 3943.32 | 11.2 | [f] |
| EU-A1716 | 3860.26 | 3860.49 | 9.8 | [e] |
| EU-A1717 | 3888.33 | 3889.23 | 8.4 | [f] |
| EU-A1718 | 3916.33 | 3916.98 | 12.6 | [i] |
| EU-A1719 | 3944.33 | 3944.31 | 9.0 | [g] |
| EU-A1722 | 3989.37 | 3990.03 | 6.1 | [f] |
| EU-A1723 | 4017.44 | 4017.54 | 7.8 | [f] |
| EU-A1730 | 3916.35 | 3917.76 | 7.8 | [f] |
| EU-A1734 | 3726.10 | 3726.63 | 14.0 | [e] |
| EU-A1735 | 3754.10 | 3754.26 | 12.9 | [f] |
| EU-A1739 | 3949.38 | 3950.31 | 13.0 | [f] |
| EU-A1740 | 3977.43 | 3978.30 | 8.9 | [g] |
| EU-A1745 | 3815.18 | 3815.10 | 13.8 | [g] |
| EU-A1784 | 3915.35 | 3917.31 | 11.0 | [f] |
| EU-A1785 | 3943.35 | 3944.40 | 14.6 | [i] |
| EU-A1787 | 3916.25 | 3917.46 | 9.1 | [g] |
| EU-A1788 | 3944.29 | 3945.45 | 10.8 | [f] |
| EU-A1841 | 3788.20 | 3789.36 | 6.6 | [f] |
| EU-A1842 | 3816.20 | 3817.80 | 11.3 | [m] |
| EU-A1847 | 3727.08 | 3728.46 | 10.9 | [f] |
| EU-A1848 | 3755.08 | 3756.96 | 10.2 | [g] |

HPLC gradients in 0.1% TFA
[a] 35 to 65% CH₃CN over 30 min.
[b] 30 to 60% CH₃CN over 20 min.
[c] 35 to 65% CH₃CN over 20 min.
[d] 25 to 55% CH₃CN over 20 min.
[e] 40 to 70% CH₃CN over 20 min.
[f] 45 to 75% CH₃CN over 20 min.
[g] 50 to 80% CH₃CN over 20 min.
[h] 10 to 40% CH₃CN over 20 min.
[i] 30 to 90% CH₃CN over 20 min.
[j] 10 to 90% CH₃CN over 20 min.
[k] 30 to 95% CH₃CN over 20 min.
[l] 30 to 60% CH₃CN over 30 min
[m] 20 to 100% CH₃CN over 20 min
[n] 20 to 80% CH₃CN over 20 min
[o] 30 to 50% CH₃CN over 20 min
HPLC on was carried out on a Phenomenex Luna C18 5 micron 250 × 4.6 mm analytical column.

### Example 6: Cellular Assay of the Compounds

[0855] Compounds were weighed precisely in an amount of approximately 1 mg and assayed in standard cellular assays (Cerep SA). The readout is the amount of cAMP generated in the cells treated with the test compounds, in either agonist or antagonist mode. The assay used was the stimulation of cAMP levels in the glucagon (human, cloned into CHO cells) and GLP-1 (murine cell line) cellular assays. The assays are described in Chicchi, G. G., et al. (1997) J Biol Chem 272: 7765-7769 and Runge, S., et al. (2003) Br J Pharmacol 138: 787-794.

[0856] For compound EU-A391 the GLCR cellular response does not change and the GLP1R cellular response rises steeply with and EC50 of 420 nM

| | | EC₅₀ | EC₅₀ murine |
|---|---|---|---|
| | | GLP-1 R | glucagon R |
| Compound | Structure | (nM) | (nM) |
| EU-A391 | 1-dodecyl | 420 | n.c. |
| EU-A455 | 1-dodecyl | 59 | 770 |
| EU-A474 | 1-dodecyl | 3000 | n.c. |
| EU-A478 | 1-dodecyl | n.c. | n.c. |
| EU-A484 | 1-dodecyl | n.c. | n.c. |
| EU-A501 | 1-dodecyl | 20000 | 12000 |
| EU-A502 | 1-dodecyl | 9400 | n.c. |
| EU-A503 | 1-dodecyl | n.c. | n.c. |
| EU-A504 | 1-dodecyl | 3100 | 1100 |
| EU-A505 | 1-dodecyl | 8500 | 6100 |
| EU-A506 | 1-dodecyl | 4600 | 1300 |
| EU-A507 | 1-dodecyl | 18 | 1 |
| EU-A521 | 1-dodecyl | n.c. | n.c. |
| EU-A522 | 1-dodecyl | n.c. | 9000 |
| EU-A523 | 1-dodecyl | n.c. | n.c. |
| EU-A524 | 1-dodecyl | n.c. | n.c. |
| EU-A525 | 1-dodecyl | n.c. | n.c. |
| EU-A526 | 1-dodecyl | n.c. | n.c. |
| EU-A527 | 1-dodecyl | n.c. | 5000 |
| EU-A529 | 1-dodecyl | n.c. | 7000 |
| EU-A531 | 1-dodecyl | 2100 | 1100 |
| EU-A532 | 1-dodecyl | 5000 | 2600 |
| EU-A533 | 1-dodecyl | 770 | 780 |
| EU-A534 | 1-dodecyl | 290 | 1900 |
| EU-A535 | 1-tetradecyl | §4800 | 2100 |
| EU-A536 | 1-hexadecyl | >10000 | 4400 |
| EU-A538 | 1-dodecyl | 270 | n.c. |
| EU-A539 | 1-dodecyl | 860 | 2300 |
| EU-A540 | 1-tetradecyl | n.c. | 8800 |
| EU-A541 | 1-hexadecyl | 800 | 5000 |

n.c. means EC50 not calculable
§ means superagonist

[0857] A further series of cellular assays were carried out using standard cellular assays (DiscoveRx, LeadHunter assays) using readout of cAMP stimulation or arrestin activation. Compounds were weighed precisely in an amount of approximately 1 mg and shipped to DiscoveRx for dilution and assay. The assay used were for the glucagon (human, cloned into CHO cells) and GLP-1 (human, cloned into CHO cells) receptors in cellular assays.

| | | EC₅₀ | | EC₅₀ |
|---|---|---|---|---|
| | EC₅₀ cAMP | arrestin | EC₅₀ cAMP | arrestin |
| | GLP-1 R | GLP-1 R | glucagon R | glucagon R |
| Compound | (nM) | (nM) | (nM) | (nM) |
| EU-A507 | 0.01 | 9 | 0.02 | 100 |
| EU-A534 | 87 | | 1100 | |
| EU-A538 | 55 | | 3500 | |
| EU-A750 | >1000 | | >1000 | |
| EU-A751 | >1000 | | >1000 | |
| EU-A752 | 146 | | >1000 | |
| EU-A753 | >1000 | | >1000 | |
| EU-A754 | 360 | | >1000 | |
| EU-A755 | 486 | | 471 | |
| EU-A756 | 611 | | >1000 | |
| EU-A757 | 6.7 | | >1000 | |
| EU-A770 | 0.01 | 2.3 | 0.5 | >100 |
| EU-A771 | 0.07 | 14.2 | 0.4 | >100 |
| EU-A772 | 0.07 | 8.4 | 5.4 | >100 |
| EU-A773 | 0.08 | 8.3 | 1.5 | >100 |
| EU-A774 | 0.009 | 6.8 | 0.15 | 22.7 |
| EU-A775 | 0.16 | 17 | 0.3 | 33.6 |
| EU-A776 | 1.2 | >100 | 6.5 | >100 |
| EU-A777 | 0.1 | 34.5 | 0.6 | 73 |
| EU-A792 | <0.05 | 27.9 | <0.05 | |
| EU-A793 | <0.05 | 23.8 | <0.05 | |
| EU-A794 | 0.05 | 59.4 | 0.18 | |
| EU-A945 | <0.05 | 9.4 | 0.06 | |
| EU-A948 | 0.08 | 25.6 | 9.1 | |
| EU-A992 | 0.009 | | 0.019 | |
| EU-A993 | <0.05 | 12.3 | <0.05 | |
| EU-A994 | 0.05 | 10.2 | <0.05 | |
| EU-A995 | 0.035 | 59.5 | 0.15 | |
| EU-A996 | 0.05 | >100 | 0.87 | |
| EU-A999 | 0.05 | | 0.015 | |
| EU-A1011 | 0.16 | | 0.51 | |
| EU-A1017 | 0.44 | | 0.10 | |
| EU-A1023 | 0.028 | | 0.035 | |
| EU-A1024 | 0.005 | | 0.035 | |
| EU-A1025 | 0.008 | | 0.240 | |
| EU-A1026 | 0.034 | | 0.486 | |
| EU-A1029 | 0.019 | | 0.06 | |
| EU-A1032 | 0.03 | | 5.4 | |
| EU-A1035 | 0.02 | | 0.19 | |
| EU-A1041 | 0.02 | | 0.13 | |
| EU-A1044 | 0.07 | | 0.57 | |
| EU-A1167 | 0.013 | | 0.019 | |
| EU-A1168 | 0.07 | | 0.14 | |
| EU-A1173 | 0.021 | | 0.463 | |
| EU-A1576 | 0.032 | | 0.070 | |
| EU-A1577 | 0.007 | | 0.069 | |
| EU-A1578 | 0.008 | | 0.355 | |
| EU-A1581 | 0.086 | | 1.032 | |
| EU-A1586 | 0.029 | | 0.107 | |
| EU-A1587 | 0.081 | | 0.253 | |
| EU-A1588 | 0.023 | | 0.043 | |
| EU-A1589 | 0.236 | | 0.655 | |
| EU-A1590 | 0.094 | | 0.343 | |
| EU-A1591 | 0.073 | | 0.286 | |
| EU-A1592 | 0.25 | | 0.78 | |
| EU-A1594 | 0.011 | | 0.068 | |
| EU-A1595 | 0.021 | | 0.113 | |
| EU-A1596 | 0.493 | | 1.230 | |
| EU-A1598 | 0.026 | | 0.199 | |
| EU-A1599 | 0.061 | | 0.317 | |
| EU-A1601 | 0.007 | | 0.048 | |
| EU-A1602 | 0.035 | | 0.162 | |
| EU-A1606 | 0.017 | | 0.058 | |
| EU-A1607 | 0.022 | | 0.126 | |
| EU-A1611 | 0.015 | | 0.16 | |
| EU-A1612 | 0.011 | | 0.059 | |
| EU-A1616 | 0.079 | | 0.204 | |
| EU-A1617 | 0.119 | | 0.598 | |
| EU-A1620 | 0.051 | | 0.24 | |
| EU-A1622 | 0.774 | | 2.08 | |
| EU-A1627 | 0.304 | | 0.705 | |
| EU-A1633 | 0.008 | | 0.053 | |
| EU-A1634 | 0.052 | | 0.493 | |
| EU-A1635 | 0.071 | | 1.983 | |
| EU-A1639 | 0.385 | | 2.292 | |
| EU-A1645 | 0.029 | | 0.091 | |
| EU-A1646 | 0.029 | | 0.332 | |
| EU-A1647 | 0.113 | | 1.895 | |
| EU-A1651 | 0.033 | | 0.149 | |
| EU-A1679 | 0.009 | | 0.14 | |
| EU-A1680 | 0.026 | | 0.114 | |
| EU-A1681 | .0.009 | | 0.132 | |
| EU-A1682 | 0.21 | | 1.263 | |
| EU-A1710 | 0.026 | | 0.065 | |
| EU-A1711 | 0.009 | | 0.026 | |
| EU-A1712 | 0.037 | | 0.175 | |
| EU-A1713 | 0.308 | | 2.509 | |
| EU-A1716 | 0.013 | | 0.032 | |
| EU-A1717 | 0.011 | | 0.035 | |
| EU-A1718 | 0.043 | | 0.097 | |
| EU-A1719 | 0.095 | | 0.746 | |
| EU-A1722 | 0.006 | | 0.012 | |
| EU-A1723 | 0.028 | | 0.062 | |
| EU-A1729 | 0.006 | | 0.558 | |
| EU-A1730 | 0.008 | | 1.172 | |
| EU-A1734 | 0.006 | | 0.387 | |
| EU-A1735 | 0.008 | | 0.931 | |
| EU-A1739 | 0.056 | | 2.223 | |
| EU-A1740 | 0.077 | | 3.825 | |
| EU-A1745 | 1.017 | | 10. | |
| EU-A1784 | 0.048 | | 1.907 | |
| EU-A1785 | 0.239 | | 5.145 | |
| EU-A1787 | 0.246 | | 10.0 | |
| EU-A1788 | 0.232 | | 10.0 | |
| EU-A1841 | 0.316 | | 0.475 | |
| EU-A1842 | 1.209 | | 2.109 | |
| EU-A1847 | 0.032 | | 1.95 | |
| EU-A1848 | 0.060 | | 3.064 | |

### Example 7: In Vivo Assay. Of Compounds—db/db Mice

[0858] The 60 female db/db B6BKS (D) Leprdb/J (strain 000697) mice for this study were approximately 8 to 9 weeks old at arrival (Jackson Laboratory, Bar Harbor, Maine). The mice were randomized by weight and two treatment groups of 8 female mice each were administered the test articles, EU-A994, ELT-A995, or ELT-A1026, at dose levels of 100 or 300 nmoles/kg. One group of 8 female mice served as the vehicle control and received the vehicle, 0.2% BSA in saline, pH 7.4. One additional group of 8 female mice received the positive control article, liraglutide., at a dose level of 50 nmoles/kg. The test articles, vehicle, and positive control article were administered on Day 1, at approximately 0, 7, and 24 hours during the study via subcutaneous injection at a dose volume of 6 mllkg.

[0859] Clinical observations were conducted at receipt, prior to randomization, and daily from Days 1 to 5. Body weights were measured and recorded at receipt, prior to randomization, and daily from Days 1 to 5. Food consumption was measured and recorded daily from Days 1 to 5. Blood samples for glucose analysis were collected pretest (Day -3) and at 0, 1, 2, 4, 8, 10, 24, 48, 72, and 96 hours following the first dose on Day 1. At study termination all animals were euthanized and the carcasses were discarded without further evaluation.

[0860] Significant body weight changes were noted against vehicle for liragiutide and high dose EU-A994 and high dose EU-A1026 on Days 2 and 3 and low dose EU-A1026 on Days 3 and 4. In the food consumption analysis, liraglutide-treated animals were significantly different from vehicle on Days 1 and 2, high dose EU-A994 at Day 1, low dose EU-A995 at Day 1 and 2, high dose EU-A994 at Day 1, and low and high dose of EU-A1026 at Day 2 were significantly different from liraglutide. Glucose levels for liraglutide at 10 hours and high dose EU-A994 at 10 and 24 hours were significantly different from vehicle. Low dose EUJ-A995 and EU-A1026 at 10 hours we^{r}e significantly different from hiraglutide (FIG. 5). In a like manner, other analogs from the series were tested for effects on blood glucose, body weight and food consumption.

| | Dose | db/db mice − Mean Blood Glucose (mg/dL) | | | |
|---|---|---|---|---|---|
| Compound | (nmole/kg) | 0 hr | 10 hr | 24 hr | 48 hr |
| liraglutide | 50 | 595 | 265 | 347 | 377 |
| EU-A994 | 300 | 554 | 242 | 209 | 385 |
| EU-A995 | 300 | 503 | 471 | 493 | 527 |
| EU-A1026 | 300 | 531 | 399 | 438 | 505 |
| liraglutide | 50 | 528 | 286 | 404 | 477 |
| EU-A993 | 250 | 503 | 305 | 324 | 426 |
| EU-A995 | 250 | 539 | 584 | 548 | 546 |
| EU-A1023 | 50 | 507 | 310 | 355 | 375 |
| EU-A1023 | 250 | 508 | 264 | 194 | 375 |
| liraglutide | 50 | 442 | 174 | 244 | 439 |
| EU-A992 | 250 | 405 | 104 | 112 | 130 |
| EU-A1167 | 250 | 379 | 171 | 117 | 113 |
| EU-A1168 | 250 | 380 | 133 | 169 | 164 |

### Example 8: In Vivo Assay of Compounds—DIO Mice

[0861] Fifty (50) diet induced obese (DIO) C57BL/6J male mice were received from JAX labs at 6 wks of age. The mice were ear notched for identification and housed individually in positively ventilated polycarbonate cages with HEPA filtered air at a density of 5 mice per cage. The animal room was lit entirely with artificial fluorescent lighting, with a controlled 12 h light/dark cycle. The normal temperature and relative humidity ranges in the animal rooms were 22±4° C. and 50±15%, respectively. Filtered tap water, acidified to a pH of 2.8 to 3. 1, and high fat diet (Research Diets D12492; 60 kcal %) was provided ad libitun.

[0862] Following a 2 week acclimation, 50 mice were randomized into groups (n=l0) as below. Group 1. Vehicle treated; Group 2. Low dose EU-A994; Group 3, high dose EU-A594; Group 4, low dose EU-A 1024; Group 5, high dose EU-A1024. Mice were dosed via SC on days 1 (0, 7 hrs., 3, 6, 9, 12, 15, 18, 21, 24. Body weights and cage side observations were recorded daily. Food and water intake was recorded weekly. Mice underwent NMR measurements for determining whole body fat and lean composition on days 1 (pre-dose) and 26. On day 26, mice were fasted overnight for an oral glucose tolerance test. Next day, the first blood sample was collected via tail nick (t=0). Mice were then administered a bolus of 1.0 g/kg glucose. Blood samples were obtained via tail nick at 0, 15, 30, 60, 90 and 120 min after glucose and plasma glucose was immediately determined using a glucometer.

[0863] Sacrifice and tissue collection: Mice were sacrificed on day 28. Terminal blood was processed to serum/plasma and aliquots were sent for analysis of glucose, insulin and lipid profile. Body composition was determined by NMR. The exemplary compound EU-A1024 showed decreased glucose excursion in the OGTT, decreased basal insulin secretion, with potentiated glucose-dependent insulin secretion, decreased weight gain (FIG. 10), decreased fat mass but minimal effects on lean mass (FIG. 11).

### Example 9: Plasma Protease Stability

[0864] Bioanalytical Method Development Summary 1. Instruments used, AP1-4000 Mass Spectrometer, ESI positive, MRM Scan; Shimadzu HPLC/CTC Autosampler with ACE C8 column (2.1×50 mm, 5 μm), Mobile Phase A: 0.1%,A Formic acid, 5 mM NH₄OAc in water, Mobi¹e Phase B: 0.1% Formic acid in CH₃CN, 1 0μL of sample was injected, IL. Standard and QC Sample Preparation: i. 1 mg/mL stock solution was prepared in DMSO/CH₃CN (1/1), ii. Make standard working solutions in 50% CH₃CN with the stock solution. The concentrations of the working solutions were 20, 50, 100, 200, 500, 1000, 2000, 5000, 10000 and 20000 ng/mL, iii. Spiked 10 μL of the working solutions into 90 μL blank plasma and vortex them, iv. Add 300 μL of internal standard solution (Verapamil, 20 ng/mL in 100% CH₃CN), vortex and centrifuge, v. Transfer the supernatant into an IHPLC injection plate for loading on the -IPLC column, vi. The standard samples were at 2, 5, 10, 20, 50, 100, 200, 500, 1000 and 2000 ng/mL. The QC samples were at 5 (LQC), 50 (MQC), and 500 (HQC) ng/mL. For the plasma stability study, samples of EU-A993, EU-A1023 and human GLP-1 (7-36, Bachem) were prepared in human plasma (approximately 6-20 ng/mL or similar concentrations above the limit of quantitation) and sampled at time points t=0, 0.5, 1, 2, 4, 8 hrs during incubation at 30degC. Samples were treated with internal standard solution (100% CH₃CN) as described above in order to precipitate the proteins and supernatentants were loaded into an injection plate to load them onto the hplc column for quantitation by mass spectrometry. A plot of compound signal (amount) versus time shows rapid decrease in GlPt-1 (7-36) and essentially no change over 8 hrs in the amount of intact compound in the human plasma for the compounds of the invention (see FIG. 8).

### Example 10: Uses of the compounds

[0865] The covalently modified peptides and/or proteins described herein are useful for the prevention and treatment of a variety of diseases related to obesity, the metabolic syndrome, cardiovascular disease and diabetes. Suitably labeled surfactant modified peptides can be used as diagnostic probes.

[0866] Representative delivery regimens include oral, parenteral (including subcutaneous, intramuscular and intravenous injection), rectal, buccal (including sublingual), transdermal, inhalation ocular and intranasal. An attractive and widely used method for delivery of peptides entails subcutaneous injection of a controlled release injectable formulation. Other administration routes for the application of the covalently modified peptides and/or proteins described herein are subcutaneous, intranasal and inhalation administration.

### Example 11. Pharmaceutical Usage for Treatment of Insulin Resistance

[0867] A human patient, with evidence of insulin or metabolic syndrome is treated with E U-A596 by intranasal administration (20 0μL) from a standard atomizer used in the art of a solution of the pharmaceutical agent in physiological saline containing from 0.5 to 10 mg/nmL of the pharmaceutical agent and containing standard excipients such as benzyl alcohol. The treatment is repeated as necessary for the alleviation of symptoms such as obesity, elevated blood glucose and the like. In a similar manner, a solution of EU-A596, and selected excipients, in an evaporating solvent containing such as a hydrofluoroalkane is administered intranasally by metered dose inhaler (MD1) as needed to reduce insulin resistance. The effect of treatment is determined using standard tests including measurement of blood glucose levels, Body Mass Index, and/or body weight and/or measurement of waist to hip ratios.

[0868] In a similar manner, administration of an adjusted amount by transbuccal, intravaginal, inhalation, subcutaneous, intravenous, intraocular, or oral routes is tested to determine level of stimulation of GLPIR and/or GLCR on cells in the body and to determine therapeutic effects.

### SEQUENCES

[0869] The specification provides sequences for SEQ. ID. Nos. 1-3 and 1108-1111 and SEQ. ID. Nos. 774-783, 785-797 and 1113, and 1025-1029. Additionally, Table 1 of FIG. 1 provides SEQ. ID Numbers for compounds ELU-A300 to EU-A425 having SEQ. ID. NOs. 4-129 respectively, as shown in Table 1 of FIG. 1. Compounds in Table 1 of FIG. 1, and their respective SEQ. ID. NOs. shown in Table 1 of FIG. 1 are hereby incorporated into the specification as filed. Additionally, Table 2 of FIG. 2 provides SEQ. ID Numbers for compounds EU-A426 to EU-A599 having SEQ. ID. NOs. 130-317 respectively, as shown in Table 2 of FIG. 2. Compounds in Table 2 of FIG. 2, and their respective SEQ. ID. NOs. shown in Table 2 of FIG. 2 are hereby incorporated into the specification as filed. Additionally, Table 3 of FIG. 3 provides SEQ. ID Numbers for compounds EU-A700 to EU-A1 174 having SEQ. ID. NOs. 318-773; 798-806 respectively, as shown in Table 3 of FIG. 3. Compounds in Table 3 of FIG. 3, and their respective SEQ. ID. NOs. shown in Table 3 of FIG. 3 are hereby incorporated into the specification as filed. Additionally, Table 4 of FIG. 9 provides SEQ. ID Numbers for compounds EU-A1575 to EU-A1870 having SEQ. ID. NOs. 807-1024 and 1030-1107 and 1114-1122 respectively, as shown in Table 4 of FIG. 9. Compounds in Table 4 of FIG. 9, and their respective SEQ. ID. NOs. shown in Table 4 of FIG. 9 are hereby incorporated into the specification as filed.

1-79. (canceled)

80. A peptide product comprising: His₁-Aib₂-Gln₃-Gly₄-Thr₅-Phe₆-Thr₇-Ser₈-Asp₉-Tyr₁₀-Ser₁₁-Lys₁₂-Tyr₁₃-Leu₁₄-Asp₁₅-Glu*₁₆-Lys(N-omega(1-(17-carboxyl-heptadecyloxy) beta-D-glucuronyl))₁₇-Ala₁₈-Ala₁₉-Lys*₂₀-Glu₂₁-Phe₂₂-Ile₂₃-Gln₂₄-Trp₂₅-Leu₂₆-Leu₂₇-Gln₂₈-Thr₂₉-NH₂ (SEQ. ID. NO. 1119) or a pharmaceutically acceptable salt thereof.

81. A pharmaceutical composition comprising a peptide product having formula His₁-Aib₂-Gln₃-Gly₄-Thr₅-Phe₆-Thr₇-Ser₈-Asp₉-Tyr₁₀-Ser₁₁-Lys₁₂-Tyr₁₃-Leu₁₄-Asp₁₅-Glu*₁₆-Lys(N-omega(1-(17-carboxyl-heptadecyloxy) beta-D-glucuronyl))₁₇-Ala₁₈-Ala₁₉-Lys*₂₀-Glu₂₁-Phe₂₂-Ile₂₃-Gln₂₄-Trp₂₅-Leu₂₆-Leu₂₇-Gln₂₈-Thr₂₉-NH₂ (SEQ. ID. NO. 1119) or a pharmaceutically acceptable salt thereof and at least one pharmaceutically acceptable carrier or excipient.

82. A method of producing a peptide product comprising formula His₁-Aib₂-Gln₃-Gly₄-Thr₅-Phe₆-Thr₇-Ser₈-Asp₉-Tyr₁₀-Ser₁₁-Lys₁₂-Tyr₁₃-Leu₁₄-Asp₁₅-Glu*₁₆-Lys(N-omega(1-(17-carboxyl-heptadecyloxy) beta-D-glucuronyl))₁₇-Ala₁₈-Ala₁₉-Lys*₂₀-Glu₂₁-Phe₂₂-Ile₂₃-Gln₂₄-Trp₂₅-Leu₂₆-Leu₂₇-Gln₂₈-Thr₂₉-NH₂ (SEQ. ID. NO. 1119) or a pharmaceutically acceptable salt thereof, comprising:
conjugating a surfactant intermediate to a protected peptide intermediate; and
deprotecting the peptide.

83. The method claim 82, wherein the surfactant intermediate is protected, and the method further comprises deprotecting the surfactant after conjugation of the protected surfactant intermediate to the protected peptide intermediate.

84. The method claim 82, further comprising removing the peptide-surfactant conjugate from a solid support.

The application's sequence listing, which the Patent Office published only in electronic form, follows.

SEQUENCE LISTING (1137 sequences)

SEQ ID NO: 1-2 - skipped (2 entries)

SEQ ID NO: 3 - protein, 30 aa, synthetic construct
  REGION 1..30: note = Description of Artificial Sequence: Synthetic polypeptide
  MOD_RES 2: note = Gly, MePro or Aib
  MOD_RES 3: note = Gln or Cit
  MOD_RES 6: note = Phe, 2FPhe, MePhe, 2FMePhe or Nal2
  MOD_RES 10: note = Tyr, Nal2, Bip, Bip2EtMeO or U(X); wherein "U(X)" is a natural or unnatural amino acid comprising a functional group covalently attached to the surfactant X
  MOD_RES 11: note = absent or Ser, Asn, Bip or U(X); wherein "U(X)" is a natural or unnatural amino acid comprising a functional group covalently attached to the surfactant X
  MOD_RES 12: note = absent or Lys, Glu, Ser or U(X); wherein "U(X)" is a natural or unnatural amino acid comprising a functional group covalently attached to the surfactant X
  MOD_RES 13: note = absent or Tyr, Gln, Cit or U(X); wherein "U(X)" is a natural or unnatural amino acid comprising a functional group covalently attached to the surfactant X
  MOD_RES 14: note = absent or Leu, Nle or U(X); wherein "U(X)" is a natural or unnatural amino acid comprising a functional group covalently attached to the surfactant X
  MOD_RES 15: note = absent or Asp, Glu or U(X); wherein "U(X)" is a natural or unnatural amino acid comprising a functional group covalently attached to the surfactant X
  MOD_RES 16: note = absent or Ser, Gly, Glu, Ala, Aib, Lys, Arg or U(X); wherein "U(X)" is a natural or unnatural amino acid comprising a functional group covalently attached to the surfactant X
  MOD_RES 17: note = absent or Arg, hArg, Gln, Glu, Lys, Cit, Aib or U(X); wherein "U(X)" is a natural or unnatural amino acid comprising a functional group covalently attached to the surfactant X
  MOD_RES 18: note = absent or Arg, hArg, Ala, Aib, Ac4c, Ac5c or U(X); wherein "U(X)" is a natural or unnatural amino acid comprising a functional group covalently attached to the surfactant X
  MOD_RES 19: note = absent or Ala, Aib or U(X); wherein "U(X)" is a natural or unnatural amino acid comprising a functional group covalently attached to the surfactant X
  MOD_RES 20: note = absent or Gln, Lys, Arg, Cit, Glu, Aib or U(X); wherein "U(X)" is a natural or unnatural amino acid comprising a functional group covalently attached to the surfactant X
  MOD_RES 21: note = absent or Asp, Glu, Leu, Aib or U(X); wherein "U(X)" is a natural or unnatural amino acid comprising a functional group covalently attached to the surfactant X
  MOD_RES 22: note = absent or Phe or U(X); wherein "U(X)" is a natural or unnatural amino acid comprising a functional group covalently attached to the surfactant X
  MOD_RES 23: note = absent or Val, Ile, Aib or U(X); wherein "U(X)" is a natural or unnatural amino acid comprising a functional group covalently attached to the surfactant X
  MOD_RES 24: note = absent or Ala, Gln or U(X); wherein "U(X)" is a natural or unnatural amino acid comprising a functional group covalently attached to the surfactant X
  MOD_RES 25: note = absent or Trp or U(X); wherein "U(X)" is a natural or unnatural amino acid comprising a functional group covalently attached to the surfactant X
  MOD_RES 26: note = absent or Leu or U(X); wherein "U(X)" is a natural or unnatural amino acid comprising a functional group covalently attached to the surfactant X
  MOD_RES 27: note = absent or Met, Val, Leu, Nle, Lys or U(X); wherein "U(X)" is a natural or unnatural amino acid comprising a functional group covalently attached to the surfactant X
  MOD_RES 28: note = absent or Asn, Gln, Cit or U(X); wherein "U(X)" is a natural or unnatural amino acid comprising a functional group covalently attached to the surfactant X
  MOD_RES 29: note = absent or Thr, Aib or U(X); wherein "U(X)" is a natural or unnatural amino acid comprising a functional group covalently attached to the surfactant X
  MOD_RES 30: note = absent or Arg or U(X); wherein "U(X)" is a natural or unnatural amino acid comprising a functional group covalently attached to the surfactant X
  REGION 1..30: note = C-term -OH or -NH-R3
  REGION 1..30: note = See specification as filed for detailed description of substitutions and preferred embodiments
HXXGTXTSDXXXXXXXXXXXXXXXXXXXXX

SEQ ID NO: 4 - protein, 11 aa, synthetic construct
  REGION 1..11: note = Description of Artificial Sequence: Synthetic peptide
  MOD_RES 2: note = Aib
  MOD_RES 11: note = Lys(C8)
  REGION 1..11: note = C-term amide
HXQGTFTSDLK

SEQ ID NO: 5 - protein, 11 aa, synthetic construct
  REGION 1..11: note = Description of Artificial Sequence: Synthetic peptide
  MOD_RES 2: note = Aib
  MOD_RES 11: note = Lys(C12)
  REGION 1..11: note = C-term amide
HXQGTFTSDLK

SEQ ID NO: 6 - protein, 11 aa, synthetic construct
  REGION 1..11: note = Description of Artificial Sequence: Synthetic peptide
  MOD_RES 2: note = Aib
  MOD_RES 11: note = Lys(C16)
  REGION 1..11: note = C-term amide
HXQGTFTSDLK

SEQ ID NO: 7 - protein, 11 aa, synthetic construct
  REGION 1..11: note = Description of Artificial Sequence: Synthetic peptide
  MOD_RES 2: note = Aib
  MOD_RES 10: note = Bip
  MOD_RES 11: note = Lys(C8)
  REGION 1..11: note = C-term amide
HXQGTFTSDXK

SEQ ID NO: 8 - protein, 11 aa, synthetic construct
  REGION 1..11: note = Description of Artificial Sequence: Synthetic peptide
  MOD_RES 2: note = Aib
  MOD_RES 10: note = Bip
  MOD_RES 11: note = Lys(C12)
  REGION 1..11: note = C-term amide
HXQGTFTSDXK

SEQ ID NO: 9 - protein, 11 aa, synthetic construct
  REGION 1..11: note = Description of Artificial Sequence: Synthetic peptide
  MOD_RES 2: note = Aib
  MOD_RES 10: note = Bip
  MOD_RES 11: note = Lys(C16)
  REGION 1..11: note = C-term amide
HXQGTFTSDXK

SEQ ID NO: 10 - protein, 11 aa, synthetic construct
  REGION 1..11: note = Description of Artificial Sequence: Synthetic peptide
  MOD_RES 2: note = Aib
  MOD_RES 10: note = Nal(2)
  MOD_RES 11: note = Lys(C8)
  REGION 1..11: note = C-term amide
HXQGTFTSDAK

SEQ ID NO: 11 - protein, 11 aa, synthetic construct
  REGION 1..11: note = Description of Artificial Sequence: Synthetic peptide
  MOD_RES 2: note = Aib
  MOD_RES 10: note = Nal(2)
  MOD_RES 11: note = Lys(C12)
  REGION 1..11: note = C-term amide
HXQGTFTSDAK

SEQ ID NO: 12 - protein, 11 aa, synthetic construct
  REGION 1..11: note = Description of Artificial Sequence: Synthetic peptide
  MOD_RES 2: note = Aib
  MOD_RES 10: note = Nal(2)
  MOD_RES 11: note = Lys(C16)
  REGION 1..11: note = C-term amide
HXQGTFTSDAK

SEQ ID NO: 13 - protein, 11 aa, synthetic construct
  REGION 1..11: note = Description of Artificial Sequence: Synthetic peptide
  MOD_RES 2: note = Aib
  MOD_RES 6: note = 2,6F-Phe
  MOD_RES 10: note = Bip2Et4MeO
  MOD_RES 11: note = Lys(C8)
  REGION 1..11: note = C-term amide
HXQGTFTSDXK

SEQ ID NO: 14 - protein, 11 aa, synthetic construct
  REGION 1..11: note = Description of Artificial Sequence: Synthetic peptide
  MOD_RES 2: note = Aib
  MOD_RES 6: note = 2,6F-Phe
  MOD_RES 10: note = Bip2Et4MeO
  MOD_RES 11: note = Lys(C12)
  REGION 1..11: note = C-term amide
HXQGTFTSDXK

SEQ ID NO: 15 - protein, 11 aa, synthetic construct
  REGION 1..11: note = Description of Artificial Sequence: Synthetic peptide
  MOD_RES 2: note = Aib
  MOD_RES 6: note = 2,6F-Phe
  MOD_RES 10: note = Bip2Et4MeO
  MOD_RES 11: note = Lys(C16)
  REGION 1..11: note = C-term amide
HXQGTFTSDXK

SEQ ID NO: 16 - protein, 15 aa, synthetic construct
  REGION 1..15: note = Description of Artificial Sequence: Synthetic peptide
  MOD_RES 2: note = Aib
  MOD_RES 15: note = Lys(C8)
  REGION 1..15: note = C-term amide
HXQGTFTSDLSKYLK

SEQ ID NO: 17 - protein, 15 aa, synthetic construct
  REGION 1..15: note = Description of Artificial Sequence: Synthetic peptide
  MOD_RES 2: note = Aib
  MOD_RES 15: note = Lys(C12)
  REGION 1..15: note = C-term amide
HXQGTFTSDLSKYLK

SEQ ID NO: 18 - protein, 15 aa, synthetic construct
  REGION 1..15: note = Description of Artificial Sequence: Synthetic peptide
  MOD_RES 2: note = Aib
  MOD_RES 15: note = Lys(C16)
  REGION 1..15: note = C-term amide
HXQGTFTSDLSKYLK

SEQ ID NO: 19 - protein, 15 aa, synthetic construct
  REGION 1..15: note = Description of Artificial Sequence: Synthetic peptide
  MOD_RES 2: note = Aib
  MOD_RES 10: note = Bip
  MOD_RES 15: note = Lys(C8)
  REGION 1..15: note = C-term amide
HXQGTFTSDXSKYLK

SEQ ID NO: 20 - protein, 15 aa, synthetic construct
  REGION 1..15: note = Description of Artificial Sequence: Synthetic peptide
  MOD_RES 2: note = Aib
  MOD_RES 10: note = Bip
  MOD_RES 15: note = Lys(C12)
  REGION 1..15: note = C-term amide
HXQGTFTSDXSKYLK

SEQ ID NO: 21 - protein, 15 aa, synthetic construct
  REGION 1..15: note = Description of Artificial Sequence: Synthetic peptide
  MOD_RES 2: note = Aib
  MOD_RES 10: note = Bip
  MOD_RES 15: note = Lys(C16)
  REGION 1..15: note = C-term amide
HXQGTFTSDXSKYLK

SEQ ID NO: 22 - protein, 15 aa, synthetic construct
  REGION 1..15: note = Description of Artificial Sequence: Synthetic peptide
  MOD_RES 2: note = Aib
  MOD_RES 10: note = Nal(2)
  MOD_RES 15: note = Lys(C8)
  REGION 1..15: note = C-term amide
HXQGTFTSDASKYLK

SEQ ID NO: 23 - protein, 15 aa, synthetic construct
  REGION 1..15: note = Description of Artificial Sequence: Synthetic peptide
  MOD_RES 2: note = Aib
  MOD_RES 10: note = Nal(2)
  MOD_RES 15: note = Lys(C12)
  REGION 1..15: note = C-term amide
HXQGTFTSDASKYLK

SEQ ID NO: 24 - protein, 15 aa, synthetic construct
  REGION 1..15: note = Description of Artificial Sequence: Synthetic peptide
  MOD_RES 2: note = Aib
  MOD_RES 10: note = Nal(2)
  MOD_RES 15: note = Lys(C16)
  REGION 1..15: note = C-term amide
HXQGTFTSDASKYLK

SEQ ID NO: 25 - protein, 15 aa, synthetic construct
  REGION 1..15: note = Description of Artificial Sequence: Synthetic peptide
  MOD_RES 2: note = Aib
  MOD_RES 6: note = 2,6F-Phe
  MOD_RES 10: note = Bip2Et4MeO
  MOD_RES 15: note = Lys(C8)
  REGION 1..15: note = C-term amide
HXQGTFTSDXSKYLK

SEQ ID NO: 26 - protein, 15 aa, synthetic construct
  REGION 1..15: note = Description of Artificial Sequence: Synthetic peptide
  MOD_RES 2: note = Aib
  MOD_RES 6: note = 2,6F-Phe
  MOD_RES 10: note = Bip2Et4MeO
  MOD_RES 15: note = Lys(C12)
  REGION 1..15: note = C-term amide
HXQGTFTSDXSKYLK

SEQ ID NO: 27 - protein, 15 aa, synthetic construct
  REGION 1..15: note = Description of Artificial Sequence: Synthetic peptide
  MOD_RES 2: note = Aib
  MOD_RES 6: note = 2,6F-Phe
  MOD_RES 10: note = Bip2Et4MeO
  MOD_RES 15: note = Lys(C16)
  REGION 1..15: note = C-term amide
HXQGTFTSDXSKYLK

SEQ ID NO: 28 - protein, 18 aa, synthetic construct
  REGION 1..18: note = Description of Artificial Sequence: Synthetic peptide
  MOD_RES 2: note = Aib
  MOD_RES 18: note = Lys(C8)
  REGION 1..18: note = C-term amide
HXQGTFTSDVSKYLDGRK

SEQ ID NO: 29 - protein, 18 aa, synthetic construct
  REGION 1..18: note = Description of Artificial Sequence: Synthetic peptide
  MOD_RES 2: note = Aib
  MOD_RES 18: note = Lys(C8)
  REGION 1..18: note = C-term amide
HXQGTFTSDLSKYLDGRK

SEQ ID NO: 30 - protein, 18 aa, synthetic construct
  REGION 1..18: note = Description of Artificial Sequence: Synthetic peptide
  MOD_RES 2: note = Aib
  MOD_RES 18: note = Lys(C12)
  REGION 1..18: note = C-term amide
HXQGTFTSDLSKYLDGRK

SEQ ID NO: 31 - protein, 18 aa, synthetic construct
  REGION 1..18: note = Description of Artificial Sequence: Synthetic peptide
  MOD_RES 2: note = Aib
  MOD_RES 18: note = Lys(C16)
  REGION 1..18: note = C-term amide
HXQGTFTSDLSKYLDGRK

SEQ ID NO: 32 - protein, 18 aa, synthetic construct
  REGION 1..18: note = Description of Artificial Sequence: Synthetic peptide
  MOD_RES 2: note = Aib
  MOD_RES 10: note = Bip
  MOD_RES 18: note = Lys(C8)
  REGION 1..18: note = C-term amide
HXQGTFTSDXSKYLDGRK

SEQ ID NO: 33 - protein, 18 aa, synthetic construct
  REGION 1..18: note = Description of Artificial Sequence: Synthetic peptide
  MOD_RES 2: note = Aib
  MOD_RES 10: note = Bip
  MOD_RES 18: note = Lys(C12)
  REGION 1..18: note = C-term amide
HXQGTFTSDXSKYLDGRK

SEQ ID NO: 34 - protein, 18 aa, synthetic construct
  REGION 1..18: note = Description of Artificial Sequence: Synthetic peptide
  MOD_RES 2: note = Aib
  MOD_RES 10: note = Bip
  MOD_RES 18: note = Lys(C16)
  REGION 1..18: note = C-term amide
HXQGTFTSDXSKYLDGRK

SEQ ID NO: 35 - protein, 18 aa, synthetic construct
  REGION 1..18: note = Description of Artificial Sequence: Synthetic peptide
  MOD_RES 2: note = Aib
  MOD_RES 10: note = Nal(2)
  MOD_RES 18: note = Lys(C8)
  REGION 1..18: note = C-term amide
HXQGTFTSDASKYLDGRK

SEQ ID NO: 36 - protein, 18 aa, synthetic construct
  REGION 1..18: note = Description of Artificial Sequence: Synthetic peptide
  MOD_RES 2: note = Aib
  MOD_RES 10: note = Nal(2)
  MOD_RES 18: note = Lys(C12)
  REGION 1..18: note = C-term amide
HXQGTFTSDASKYLDGRK

SEQ ID NO: 37 - protein, 18 aa, synthetic construct
  REGION 1..18: note = Description of Artificial Sequence: Synthetic peptide
  MOD_RES 2: note = Aib
  MOD_RES 10: note = Nal(2)
  MOD_RES 18: note = Lys(C16)
  REGION 1..18: note = C-term amide
HXQGTFTSDASKYLDGRK

SEQ ID NO: 38 - protein, 18 aa, synthetic construct
  REGION 1..18: note = Description of Artificial Sequence: Synthetic peptide
  MOD_RES 2: note = Aib
  MOD_RES 6: note = 2,6F-Phe
  MOD_RES 10: note = Bip2Et4MeO
  MOD_RES 18: note = Lys(C8)
  REGION 1..18: note = C-term amide
HXQGTFTSDXSKYLDGRK

SEQ ID NO: 39 - protein, 18 aa, synthetic construct
  REGION 1..18: note = Description of Artificial Sequence: Synthetic peptide
  MOD_RES 2: note = Aib
  MOD_RES 6: note = 2,6F-Phe
  MOD_RES 10: note = Bip2Et4MeO
  MOD_RES 18: note = Lys(C12)
  REGION 1..18: note = C-term amide
HXQGTFTSDXSKYLDGRK

SEQ ID NO: 40 - protein, 18 aa, synthetic construct
  REGION 1..18: note = Description of Artificial Sequence: Synthetic peptide
  MOD_RES 2: note = Aib
  MOD_RES 6: note = 2,6F-Phe
  MOD_RES 10: note = Bip2Et4MeO
  MOD_RES 18: note = Lys(C16)
  REGION 1..18: note = C-term amide
HXQGTFTSDXSKYLDGRK

SEQ ID NO: 41 - protein, 11 aa, synthetic construct
  REGION 1..11: note = Description of Artificial Sequence: Synthetic peptide
  MOD_RES 2: note = Aib
  MOD_RES 11: note = Lys(C8)
  REGION 1..11: note = C-term amide
HXQGTFTSDLK

SEQ ID NO: 42 - protein, 11 aa, synthetic construct
  REGION 1..11: note = Description of Artificial Sequence: Synthetic peptide
  MOD_RES 2: note = Aib
  MOD_RES 11: note = Lys(C12)
  REGION 1..11: note = C-term amide
HXQGTFTSDLK

SEQ ID NO: 43 - protein, 11 aa, synthetic construct
  REGION 1..11: note = Description of Artificial Sequence: Synthetic peptide
  MOD_RES 2: note = Aib
  MOD_RES 11: note = Lys(C16)
  REGION 1..11: note = C-term amide
HXQGTFTSDLK

SEQ ID NO: 44 - protein, 11 aa, synthetic construct
  REGION 1..11: note = Description of Artificial Sequence: Synthetic peptide
  MOD_RES 2: note = Aib
  MOD_RES 10: note = Bip
  MOD_RES 11: note = Lys(C8)
  REGION 1..11: note = C-term amide
HXQGTFTSDXK

SEQ ID NO: 45 - protein, 11 aa, synthetic construct
  REGION 1..11: note = Description of Artificial Sequence: Synthetic peptide
  MOD_RES 2: note = Aib
  MOD_RES 10: note = Bip
  MOD_RES 11: note = Lys(C12)
  REGION 1..11: note = C-term amide
HXQGTFTSDXK

SEQ ID NO: 46 - protein, 11 aa, synthetic construct
  REGION 1..11: note = Description of Artificial Sequence: Synthetic peptide
  MOD_RES 2: note = Aib
  MOD_RES 10: note = Bip
  MOD_RES 11: note = Lys(C16)
  REGION 1..11: note = C-term amide
HXQGTFTSDXK

SEQ ID NO: 47 - protein, 11 aa, synthetic construct
  REGION 1..11: note = Description of Artificial Sequence: Synthetic peptide
  MOD_RES 2: note = Aib
  MOD_RES 10: note = Nal(2)
  MOD_RES 11: note = Lys(C8)
  REGION 1..11: note = C-term amide
HXQGTFTSDAK

SEQ ID NO: 48 - protein, 11 aa, synthetic construct
  REGION 1..11: note = Description of Artificial Sequence: Synthetic peptide
  MOD_RES 2: note = Aib
  MOD_RES 10: note = Nal(2)
  MOD_RES 11: note = Lys(C12)
  REGION 1..11: note = C-term amide
HXQGTFTSDAK

SEQ ID NO: 49 - protein, 11 aa, synthetic construct
  REGION 1..11: note = Description of Artificial Sequence: Synthetic peptide
  MOD_RES 2: note = Aib
  MOD_RES 10: note = Nal(2)
  MOD_RES 11: note = Lys(C16)
  REGION 1..11: note = C-term amide
HXQGTFTSDAK

SEQ ID NO: 50 - protein, 11 aa, synthetic construct
  REGION 1..11: note = Description of Artificial Sequence: Synthetic peptide
  MOD_RES 2: note = Aib
  MOD_RES 6: note = 2,6F-Phe
  MOD_RES 10: note = Bip2Et4MeO
  MOD_RES 11: note = Lys(C8)
  REGION 1..11: note = C-term amide
HXQGTFTSDXK

SEQ ID NO: 51 - protein, 11 aa, synthetic construct
  REGION 1..11: note = Description of Artificial Sequence: Synthetic peptide
  MOD_RES 2: note = Aib
  MOD_RES 6: note = 2,6F-Phe
  MOD_RES 10: note = Bip2Et4MeO
  MOD_RES 11: note = Lys(C12)
  REGION 1..11: note = C-term amide
HXQGTFTSDXK

SEQ ID NO: 52 - protein, 11 aa, synthetic construct
  REGION 1..11: note = Description of Artificial Sequence: Synthetic peptide
  MOD_RES 2: note = Aib
  MOD_RES 6: note = 2,6F-Phe
  MOD_RES 10: note = Bip2Et4MeO
  MOD_RES 11: note = Lys(C16)
  REGION 1..11: note = C-term amide
HXQGTFTSDXK

SEQ ID NO: 53 - protein, 11 aa, synthetic construct
  REGION 1..11: note = Description of Artificial Sequence: Synthetic peptide
  MOD_RES 2: note = Aib
  MOD_RES 6: note = 2,6Me-Phe
  MOD_RES 10: note = Bip
  MOD_RES 11: note = Lys(C8)
  REGION 1..11: note = C-term amide
HXQGTFTSDXK

SEQ ID NO: 54 - protein, 11 aa, synthetic construct
  REGION 1..11: note = Description of Artificial Sequence: Synthetic peptide
  MOD_RES 2: note = Aib
  MOD_RES 6: note = 2,6Me-Phe
  MOD_RES 10: note = Bip
  MOD_RES 11: note = Lys(C12)
  REGION 1..11: note = C-term amide
HXQGTFTSDXK

SEQ ID NO: 55 - protein, 11 aa, synthetic construct
  REGION 1..11: note = Description of Artificial Sequence: Synthetic peptide
  MOD_RES 2: note = Aib
  MOD_RES 6: note = 2,6Me-Phe
  MOD_RES 10: note = Bip
  MOD_RES 11: note = Lys(C16)
  REGION 1..11: note = C-term amide
HXQGTFTSDXK

SEQ ID NO: 56 - protein, 15 aa, synthetic construct
  REGION 1..15: note = Description of Artificial Sequence: Synthetic peptide
  MOD_RES 2: note = Aib
  MOD_RES 6: note = Me-Phe
  MOD_RES 15: note = Lys(C8)
  REGION 1..15: note = C-term amide
HXQGTFTSDLSKYLK

SEQ ID NO: 57 - protein, 15 aa, synthetic construct
  REGION 1..15: note = Description of Artificial Sequence: Synthetic peptide
  MOD_RES 2: note = Aib
  MOD_RES 6: note = Me-Phe
  MOD_RES 15: note = Lys(C12)
  REGION 1..15: note = C-term amide
HXQGTFTSDLSKYLK

SEQ ID NO: 58 - protein, 15 aa, synthetic construct
  REGION 1..15: note = Description of Artificial Sequence: Synthetic peptide
  MOD_RES 2: note = Aib
  MOD_RES 6: note = Me-Phe
  MOD_RES 15: note = Lys(C16)
  REGION 1..15: note = C-term amide
HXQGTFTSDLSKYLK

SEQ ID NO: 59 - protein, 15 aa, synthetic construct
  REGION 1..15: note = Description of Artificial Sequence: Synthetic peptide
  MOD_RES 2: note = Aib
  MOD_RES 6: note = Me-Phe
  MOD_RES 10: note = Bip
  MOD_RES 15: note = Lys(C8)
  REGION 1..15: note = C-term amide
HXQGTFTSDXSKYLK

SEQ ID NO: 60 - protein, 15 aa, synthetic construct
  REGION 1..15: note = Description of Artificial Sequence: Synthetic peptide
  MOD_RES 2: note = Aib
  MOD_RES 6: note = Me-Phe
  MOD_RES 10: note = Bip
  MOD_RES 15: note = Lys(C12)
  REGION 1..15: note = C-term amide
HXQGTFTSDXSKYLK

SEQ ID NO: 61 - protein, 15 aa, synthetic construct
  REGION 1..15: note = Description of Artificial Sequence: Synthetic peptide
  MOD_RES 2: note = Aib
  MOD_RES 6: note = Me-Phe
  MOD_RES 10: note = Bip
  MOD_RES 15: note = Lys(C16)
  REGION 1..15: note = C-term amide
HXQGTFTSDXSKYLK

SEQ ID NO: 62 - protein, 15 aa, synthetic construct
  REGION 1..15: note = Description of Artificial Sequence: Synthetic peptide
  MOD_RES 2: note = Aib
  MOD_RES 6: note = Me-Phe
  MOD_RES 10: note = Nal(2)
  MOD_RES 15: note = Lys(C8)
  REGION 1..15: note = C-term amide
HXQGTFTSDASKYLK

SEQ ID NO: 63 - protein, 15 aa, synthetic construct
  REGION 1..15: note = Description of Artificial Sequence: Synthetic peptide
  MOD_RES 2: note = Aib
  MOD_RES 6: note = Me-Phe
  MOD_RES 10: note = Nal(2)
  MOD_RES 15: note = Lys(C12)
  REGION 1..15: note = C-term amide
HXQGTFTSDASKYLK

SEQ ID NO: 64 - protein, 15 aa, synthetic construct
  REGION 1..15: note = Description of Artificial Sequence: Synthetic peptide
  MOD_RES 2: note = Aib
  MOD_RES 6: note = Me-Phe
  MOD_RES 10: note = Nal(2)
  MOD_RES 15: note = Lys(C16)
  REGION 1..15: note = C-term amide
HXQGTFTSDASKYLK

SEQ ID NO: 65 - protein, 15 aa, synthetic construct
  REGION 1..15: note = Description of Artificial Sequence: Synthetic peptide
  MOD_RES 2: note = Aib
  MOD_RES 6: note = Me-Phe
  MOD_RES 10: note = Bip2Et4MeO
  MOD_RES 15: note = Lys(C8)
  REGION 1..15: note = C-term amide
HXQGTFTSDXSKYLK

SEQ ID NO: 66 - protein, 15 aa, synthetic construct
  REGION 1..15: note = Description of Artificial Sequence: Synthetic peptide
  MOD_RES 2: note = Aib
  MOD_RES 6: note = Me-Phe
  MOD_RES 10: note = Bip2Et4MeO
  MOD_RES 15: note = Lys(C12)
  REGION 1..15: note = C-term amide
HXQGTFTSDXSKYLK

SEQ ID NO: 67 - protein, 15 aa, synthetic construct
  REGION 1..15: note = Description of Artificial Sequence: Synthetic peptide
  MOD_RES 2: note = Aib
  MOD_RES 6: note = Me-Phe
  MOD_RES 10: note = Bip2Et4MeO
  MOD_RES 15: note = Lys(C16)
  REGION 1..15: note = C-term amide
HXQGTFTSDXSKYLK

SEQ ID NO: 68 - protein, 17 aa, synthetic construct
  REGION 1..17: note = Description of Artificial Sequence: Synthetic peptide
  MOD_RES 2: note = Aib
  MOD_RES 17: note = Lys(C8)
  REGION 1..17: note = C-term amide
HXQGTFTSDVSKYLESK

SEQ ID NO: 69 - protein, 17 aa, synthetic construct
  REGION 1..17: note = Description of Artificial Sequence: Synthetic peptide
  MOD_RES 2: note = Aib
  MOD_RES 17: note = Lys(C8)
  REGION 1..17: note = C-term amide
HXQGTFTSDLSKYLESK

SEQ ID NO: 70 - protein, 17 aa, synthetic construct
  REGION 1..17: note = Description of Artificial Sequence: Synthetic peptide
  MOD_RES 2: note = Aib
  MOD_RES 17: note = Lys(C12)
  REGION 1..17: note = C-term amide
HXQGTFTSDLSKYLESK

SEQ ID NO: 71 - protein, 17 aa, synthetic construct
  REGION 1..17: note = Description of Artificial Sequence: Synthetic peptide
  MOD_RES 2: note = Aib
  MOD_RES 17: note = Lys(C16)
  REGION 1..17: note = C-term amide
HXQGTFTSDLSKYLESK

SEQ ID NO: 72 - protein, 17 aa, synthetic construct
  REGION 1..17: note = Description of Artificial Sequence: Synthetic peptide
  MOD_RES 2: note = Aib
  MOD_RES 10: note = Bip
  MOD_RES 17: note = Lys(C8)
  REGION 1..17: note = C-term amide
HXQGTFTSDXSKYLESK

SEQ ID NO: 73 - protein, 17 aa, synthetic construct
  REGION 1..17: note = Description of Artificial Sequence: Synthetic peptide
  MOD_RES 2: note = Aib
  MOD_RES 10: note = Bip
  MOD_RES 17: note = Lys(C12)
  REGION 1..17: note = C-term amide
HXQGTFTSDXSKYLESK

SEQ ID NO: 74 - protein, 17 aa, synthetic construct
  REGION 1..17: note = Description of Artificial Sequence: Synthetic peptide
  MOD_RES 2: note = Aib
  MOD_RES 10: note = Bip
  MOD_RES 17: note = Lys(C16)
  REGION 1..17: note = C-term amide
HXQGTFTSDXSKYLESK

SEQ ID NO: 75 - protein, 17 aa, synthetic construct
  REGION 1..17: note = Description of Artificial Sequence: Synthetic peptide
  MOD_RES 2: note = Aib
  MOD_RES 10: note = Nal(2)
  MOD_RES 17: note = Lys(C8)
  REGION 1..17: note = C-term amide
HXQGTFTSDASKYLESK

SEQ ID NO: 76 - protein, 17 aa, synthetic construct
  REGION 1..17: note = Description of Artificial Sequence: Synthetic peptide
  MOD_RES 2: note = Aib
  MOD_RES 10: note = Nal(2)
  MOD_RES 17: note = Lys(C12)
  REGION 1..17: note = C-term amide
HXQGTFTSDASKYLESK

SEQ ID NO: 77 - protein, 17 aa, synthetic construct
  REGION 1..17: note = Description of Artificial Sequence: Synthetic peptide
  MOD_RES 2: note = Aib
  MOD_RES 10: note = Nal(2)
  MOD_RES 17: note = Lys(C16)
  REGION 1..17: note = C-term amide
HXQGTFTSDASKYLESK

SEQ ID NO: 78 - protein, 17 aa, synthetic construct
  REGION 1..17: note = Description of Artificial Sequence: Synthetic peptide
  MOD_RES 2: note = Aib
  MOD_RES 6: note = 2,6F-Phe
  MOD_RES 10: note = Bip2Et4MeO
  MOD_RES 17: note = Lys(C8)
  REGION 1..17: note = C-term amide
HXQGTFTSDXSKYLESK

SEQ ID NO: 79 - protein, 17 aa, synthetic construct
  REGION 1..17: note = Description of Artificial Sequence: Synthetic peptide
  MOD_RES 2: note = Aib
  MOD_RES 6: note = 2,6F-Phe
  MOD_RES 10: note = Bip2Et4MeO
  MOD_RES 17: note = Lys(C12)
  REGION 1..17: note = C-term amide
HXQGTFTSDXSKYLESK

SEQ ID NO: 80 - protein, 17 aa, synthetic construct
  REGION 1..17: note = Description of Artificial Sequence: Synthetic peptide
  MOD_RES 2: note = Aib
  MOD_RES 6: note = 2,6F-Phe
  MOD_RES 10: note = Bip2Et4MeO
  MOD_RES 17: note = Lys(C16)
  REGION 1..17: note = C-term amide
HXQGTFTSDXSKYLESK

SEQ ID NO: 81 - protein, 17 aa, synthetic construct
  REGION 1..17: note = Description of Artificial Sequence: Synthetic peptide
  MOD_RES 2: note = Aib
  MOD_RES 10: note = Bip
  MOD_RES 17: note = Lys(C8)
  REGION 1..17: note = C-term amide
HXQGTFTSDXSKYLDSK

SEQ ID NO: 82 - protein, 17 aa, synthetic construct
  REGION 1..17: note = Description of Artificial Sequence: Synthetic peptide
  MOD_RES 2: note = Aib
  MOD_RES 10: note = Bip
  MOD_RES 17: note = Lys(C12)
  REGION 1..17: note = C-term amide
HXQGTFTSDXSKYLDSK

SEQ ID NO: 83 - protein, 17 aa, synthetic construct
  REGION 1..17: note = Description of Artificial Sequence: Synthetic peptide
  MOD_RES 2: note = Aib
  MOD_RES 10: note = Bip
  MOD_RES 17: note = Lys(C16)
  REGION 1..17: note = C-term amide
HXQGTFTSDXSKYLDSK

SEQ ID NO: 84 - protein, 17 aa, synthetic construct
  REGION 1..17: note = Description of Artificial Sequence: Synthetic peptide
  MOD_RES 2: note = Aib
  MOD_RES 10: note = Bip
  MOD_RES 17: note = Lys(C8)
  REGION 1..17: note = C-term amide
HXQGTFTSDXSKYLDRK

SEQ ID NO: 85 - protein, 17 aa, synthetic construct
  REGION 1..17: note = Description of Artificial Sequence: Synthetic peptide
  MOD_RES 2: note = Aib
  MOD_RES 10: note = Bip
  MOD_RES 17: note = Lys(C12)
  REGION 1..17: note = C-term amide
HXQGTFTSDXSKYLDRK

SEQ ID NO: 86 - protein, 17 aa, synthetic construct
  REGION 1..17: note = Description of Artificial Sequence: Synthetic peptide
  MOD_RES 2: note = Aib
  MOD_RES 10: note = Bip
  MOD_RES 17: note = Lys(C16)
  REGION 1..17: note = C-term amide
HXQGTFTSDXSKYLDRK

SEQ ID NO: 87 - protein, 17 aa, synthetic construct
  REGION 1..17: note = Description of Artificial Sequence: Synthetic peptide
  MOD_RES 2: note = Aib
  MOD_RES 17: note = Lys(C8)
  REGION 1..17: note = C-term amide
HXQGTFTSDYSKYLDRK

SEQ ID NO: 88 - protein, 17 aa, synthetic construct
  REGION 1..17: note = Description of Artificial Sequence: Synthetic peptide
  MOD_RES 2: note = Aib
  MOD_RES 17: note = Lys(C12)
  REGION 1..17: note = C-term amide
HXQGTFTSDYSKYLDRK

SEQ ID NO: 89 - protein, 17 aa, synthetic construct
  REGION 1..17: note = Description of Artificial Sequence: Synthetic peptide
  MOD_RES 2: note = Aib
  MOD_RES 17: note = Lys(C16)
  REGION 1..17: note = C-term amide
HXQGTFTSDYSKYLDRK

SEQ ID NO: 90 - protein, 17 aa, synthetic construct
  REGION 1..17: note = Description of Artificial Sequence: Synthetic peptide
  MOD_RES 2: note = Aib
  MOD_RES 16: note = hArg
  MOD_RES 17: note = Lys(C12)
  REGION 1..17: note = C-term amide
HXQGTFTSDYSKYLDRK

SEQ ID NO: 91 - protein, 17 aa, synthetic construct
  REGION 1..17: note = Description of Artificial Sequence: Synthetic peptide
  MOD_RES 2: note = Aib
  MOD_RES 10: note = Bip
  MOD_RES 17: note = Lys(C12)
  REGION 1..17: note = C-term amide
HXQGTFTSDXSKYLESK

SEQ ID NO: 92 - protein, 17 aa, synthetic construct
  REGION 1..17: note = Description of Artificial Sequence: Synthetic peptide
  MOD_RES 2: note = Aib
  MOD_RES 6: note = Me-Phe
  MOD_RES 10: note = Bip
  MOD_RES 17: note = Lys(C12)
  REGION 1..17: note = C-term amide
HXQGTFTSDXSKYLESK

SEQ ID NO: 93 - protein, 17 aa, synthetic construct
  REGION 1..17: note = Description of Artificial Sequence: Synthetic peptide
  MOD_RES 2: note = Aib
  MOD_RES 6: note = Me-Phe
  MOD_RES 10: note = Bip
  MOD_RES 12: note = Aib
  MOD_RES 17: note = Lys(C12)
  REGION 1..17: note = C-term amide
HXQGTFTSDXSXYLESK

SEQ ID NO: 94 - protein, 17 aa, synthetic construct
  REGION 1..17: note = Description of Artificial Sequence: Synthetic peptide
  MOD_RES 2: note = Aib
  MOD_RES 6: note = Me-Phe
  MOD_RES 10: note = Bip
  MOD_RES 16: note = Aib
  MOD_RES 17: note = Lys(C12)
  REGION 1..17: note = C-term amide
HXQGTFTSDXSKYLEXK

SEQ ID NO: 95 - protein, 17 aa, synthetic construct
  REGION 1..17: note = Description of Artificial Sequence: Synthetic peptide
  MOD_RES 2: note = Aib
  MOD_RES 6: note = Me-Phe
  MOD_RES 16: note = Aib
  MOD_RES 17: note = Lys(C12)
  REGION 1..17: note = C-term amide
HXQGTFTSDYSKYLDXK

SEQ ID NO: 96 - protein, 17 aa, synthetic construct
  REGION 1..17: note = Description of Artificial Sequence: Synthetic peptide
  MOD_RES 2: note = Aib
  MOD_RES 6: note = Me-Phe
  MOD_RES 11: note = Aib
  MOD_RES 16: note = Aib
  MOD_RES 17: note = Lys(C12)
  REGION 1..17: note = C-term amide
HXQGTFTSDYXKYLDXK

SEQ ID NO: 97 - protein, 12 aa, synthetic construct
  REGION 1..12: note = Description of Artificial Sequence: Synthetic peptide
  MOD_RES 2: note = Aib
  MOD_RES 6: note = Me-Phe
  MOD_RES 11: note = Aib
  MOD_RES 12: note = Lys(C12)
  REGION 1..12: note = C-term amide
HXQGTFTSDYXK

SEQ ID NO: 98 - protein, 12 aa, synthetic construct
  REGION 1..12: note = Description of Artificial Sequence: Synthetic peptide
  MOD_RES 2: note = Aib
  MOD_RES 6: note = Me-Phe
  MOD_RES 10: note = Nal(2)
  MOD_RES 11: note = Aib
  MOD_RES 12: note = Lys(C12)
  REGION 1..12: note = C-term amide
HXQGTFTSDAXK

SEQ ID NO: 99 - protein, 18 aa, synthetic construct
  REGION 1..18: note = Description of Artificial Sequence: Synthetic peptide
  MOD_RES 2: note = Aib
  MOD_RES 6: note = Me-Phe
  MOD_RES 16: note = Aib
  MOD_RES 17: note = Lys(C12)
  MOD_RES 18: note = Aib
  REGION 1..18: note = C-term amide
HXQGTFTSDYSKYLDXKX

SEQ ID NO: 100 - protein, 18 aa, synthetic construct
  REGION 1..18: note = Description of Artificial Sequence: Synthetic peptide
  MOD_RES 2: note = Aib
  MOD_RES 6: note = Me-Phe
  MOD_RES 10: note = Nal(2)
  MOD_RES 16: note = Aib
  MOD_RES 17: note = Lys(C12)
  MOD_RES 18: note = Aib
  REGION 1..18: note = C-term amide
HXQGTFTSDASKYLDXKX

SEQ ID NO: 101 - protein, 17 aa, synthetic construct
  REGION 1..17: note = Description of Artificial Sequence: Synthetic peptide
  MOD_RES 2: note = Aib
  MOD_RES 6: note = Me-Phe
  MOD_RES 11: note = Aib
  MOD_RES 16: note = Aib
  MOD_RES 17: note = Lys(C12)
  REGION 1..17: note = C-term amide
HXQGTFTSDYXKYLDXK

SEQ ID NO: 102 - protein, 18 aa, synthetic construct
  REGION 1..18: note = Description of Artificial Sequence: Synthetic peptide
  MOD_RES 2: note = Aib
  MOD_RES 6: note = Me-Phe
  MOD_RES 11: note = Aib
  MOD_RES 16: note = Aib
  MOD_RES 17: note = Lys(C12)
  MOD_RES 18: note = Aib
  REGION 1..18: note = C-term amide
HXQGTFTSDYXKYLDXKX

SEQ ID NO: 103 - protein, 18 aa, synthetic construct
  REGION 1..18: note = Description of Artificial Sequence: Synthetic peptide
  MOD_RES 2: note = Aib
  MOD_RES 6: note = Me-Phe
  MOD_RES 16: note = Aib
  MOD_RES 17: note = Lys(C12)
  MOD_RES 18: note = Aib
  REGION 1..18: note = C-term amide
HXQGTFTSDYSKYLDXKX

SEQ ID NO: 104 - protein, 19 aa, synthetic construct
  REGION 1..19: note = Description of Artificial Sequence: Synthetic peptide
  MOD_RES 2: note = Aib
  MOD_RES 6: note = Me-Phe
  MOD_RES 17: note = Aib
  MOD_RES 18: note = Lys(C12)
  MOD_RES 19: note = Aib
  REGION 1..19: note = C-term amide
HXQGTFTSDYSKYLDRXKX

SEQ ID NO: 105 - protein, 19 aa, synthetic construct
  REGION 1..19: note = Description of Artificial Sequence: Synthetic peptide
  MOD_RES 2: note = Aib
  MOD_RES 6: note = Me-Phe
  MOD_RES 11: note = Aib
  MOD_RES 17: note = Aib
  MOD_RES 18: note = Lys(C12)
  MOD_RES 19: note = Aib
  REGION 1..19: note = C-term amide
HXQGTFTSDYXKYLDRXKX

SEQ ID NO: 106 - protein, 19 aa, synthetic construct
  REGION 1..19: note = Description of Artificial Sequence: Synthetic peptide
  MOD_RES 2: note = Aib
  MOD_RES 6: note = Me-Phe
  MOD_RES 11: note = Aib
  MOD_RES 17: note = Aib
  MOD_RES 18: note = Lys(C12)
  MOD_RES 19: note = Ac5c
  REGION 1..19: note = C-term amide
HXQGTFTSDYXKYLDRXKX

SEQ ID NO: 107 - protein, 18 aa, synthetic construct
  REGION 1..18: note = Description of Artificial Sequence: Synthetic peptide
  MOD_RES 2: note = Aib
  MOD_RES 6: note = Me-Phe
  MOD_RES 10: note = Nal(2)
  MOD_RES 11: note = Aib
  MOD_RES 17: note = Aib
  MOD_RES 18: note = Lys(C12)
  REGION 1..18: note = C-term amide
HXQGTFTSDAXKYLERXK

SEQ ID NO: 108 - protein, 19 aa, synthetic construct
  REGION 1..19: note = Description of Artificial Sequence: Synthetic peptide
  MOD_RES 2: note = Aib
  MOD_RES 16: note = hArg
  MOD_RES 17: note = Aib
  MOD_RES 18: note = Lys(C8)
  MOD_RES 19: note = Aib
  REGION 1..19: note = C-term amide
HXQGTFTSDYSKYLDRXKX

SEQ ID NO: 109 - protein, 19 aa, synthetic construct
  REGION 1..19: note = Description of Artificial Sequence: Synthetic peptide
  MOD_RES 2: note = Aib
  MOD_RES 16: note = hArg
  MOD_RES 17: note = Aib
  MOD_RES 18: note = Lys(C12)
  MOD_RES 19: note = Aib
  REGION 1..19: note = C-term amide
HXQGTFTSDYSKYLDRXKX

SEQ ID NO: 110 - protein, 19 aa, synthetic construct
  REGION 1..19: note = Description of Artificial Sequence: Synthetic peptide
  MOD_RES 2: note = Aib
  MOD_RES 16: note = hArg
  MOD_RES 17: note = Aib
  MOD_RES 18: note = Lys(C16)
  MOD_RES 19: note = Aib
  REGION 1..19: note = C-term amide
HXQGTFTSDYSKYLDRXKX

SEQ ID NO: 111 - protein, 14 aa, synthetic construct
  REGION 1..14: note = Description of Artificial Sequence: Synthetic peptide
  MOD_RES 2: note = Aib
  MOD_RES 6: note = Me-Phe
  MOD_RES 11: note = Aib
  MOD_RES 14: note = Lys(C12)
  REGION 1..14: note = C-term amide
HXQGTFTSDYXKYK

SEQ ID NO: 112 - protein, 14 aa, synthetic construct
  REGION 1..14: note = Description of Artificial Sequence: Synthetic peptide
  MOD_RES 2: note = Aib
  MOD_RES 6: note = Me-Phe
  MOD_RES 11: note = Aib
  MOD_RES 14: note = Lys(C12)
  REGION 1..14: note = C-term NHEt
HXQGTFTSDYXKYK

SEQ ID NO: 113 - protein, 15 aa, synthetic construct
  REGION 1..15: note = Description of Artificial Sequence: Synthetic peptide
  MOD_RES 2: note = Aib
  MOD_RES 6: note = Me-Phe
  MOD_RES 11: note = Aib
  MOD_RES 14: note = Lys(C12)
  MOD_RES 15: note = Aib
  REGION 1..15: note = C-term amide
HXQGTFTSDYXKYKX

SEQ ID NO: 114 - protein, 15 aa, synthetic construct
  REGION 1..15: note = Description of Artificial Sequence: Synthetic peptide
  MOD_RES 2: note = Aib
  MOD_RES 6: note = Me-Phe
  MOD_RES 11: note = Aib
  MOD_RES 14: note = Lys(C12)
  MOD_RES 15: note = Aib
  REGION 1..15: note = C-term NHEt
HXQGTFTSDYXKYKX

SEQ ID NO: 115 - protein, 15 aa, synthetic construct
  REGION 1..15: note = Description of Artificial Sequence: Synthetic peptide
  MOD_RES 2: note = Aib
  MOD_RES 6: note = Me-Phe
  MOD_RES 11: note = Aib
  MOD_RES 14: note = Lys(C12)
  MOD_RES 15: note = Ac5c
  REGION 1..15: note = C-term amide
HXQGTFTSDYXKYKX

SEQ ID NO: 116 - protein, 17 aa, synthetic construct
  REGION 1..17: note = Description of Artificial Sequence: Synthetic peptide
  MOD_RES 2: note = Aib
  MOD_RES 6: note = Me-Phe
  MOD_RES 16: note = Aib
  MOD_RES 17: note = Lys(C8)
  REGION 1..17: note = C-term amide
HXQGTFTSDYSKYLDXK

SEQ ID NO: 117 - protein, 17 aa, synthetic construct
  REGION 1..17: note = Description of Artificial Sequence: Synthetic peptide
  MOD_RES 2: note = Aib
  MOD_RES 6: note = Me-Phe
  MOD_RES 16: note = Aib
  MOD_RES 17: note = Lys(C16)
  REGION 1..17: note = C-term amide
HXQGTFTSDYSKYLDXK

SEQ ID NO: 118 - protein, 17 aa, synthetic construct
  REGION 1..17: note = Description of Artificial Sequence: Synthetic peptide
  MOD_RES 2: note = Aib
  MOD_RES 16: note = Aib
  MOD_RES 17: note = Lys(C8)
  REGION 1..17: note = C-term amide
HXQGTFTSDYSKYLDXK

SEQ ID NO: 119 - protein, 17 aa, synthetic construct
  REGION 1..17: note = Description of Artificial Sequence: Synthetic peptide
  MOD_RES 2: note = Aib
  MOD_RES 16: note = Aib
  MOD_RES 17: note = Lys(C12)
  REGION 1..17: note = C-term amide
HXQGTFTSDYSKYLDXK

SEQ ID NO: 120 - protein, 17 aa, synthetic construct
  REGION 1..17: note = Description of Artificial Sequence: Synthetic peptide
  MOD_RES 2: note = Aib
  MOD_RES 16: note = Aib
  MOD_RES 17: note = Lys(C16)
  REGION 1..17: note = C-term amide
HXQGTFTSDYSKYLDXK

SEQ ID NO: 121 - protein, 19 aa, synthetic construct
  REGION 1..19: note = Description of Artificial Sequence: Synthetic peptide
  MOD_RES 2: note = Aib
  MOD_RES 6: note = Me-Phe
  MOD_RES 17: note = Aib
  MOD_RES 18: note = Lys(C8)
  MOD_RES 19: note = Aib
  REGION 1..19: note = C-term amide
HXQGTFTSDYSKYLDSXKX

SEQ ID NO: 122 - protein, 19 aa, synthetic construct
  REGION 1..19: note = Description of Artificial Sequence: Synthetic peptide
  MOD_RES 2: note = Aib
  MOD_RES 6: note = Me-Phe
  MOD_RES 17: note = Aib
  MOD_RES 18: note = Lys(C12)
  MOD_RES 19: note = Aib
  REGION 1..19: note = C-term amide
HXQGTFTSDYSKYLDSXKX

SEQ ID NO: 123 - protein, 19 aa, synthetic construct
  REGION 1..19: note = Description of Artificial Sequence: Synthetic peptide
  MOD_RES 2: note = Aib
  MOD_RES 6: note = Me-Phe
  MOD_RES 17: note = Aib
  MOD_RES 18: note = Lys(C16)
  MOD_RES 19: note = Aib
  REGION 1..19: note = C-term amide
HXQGTFTSDYSKYLDSXKX

SEQ ID NO: 124 - protein, 19 aa, synthetic construct
  REGION 1..19: note = Description of Artificial Sequence: Synthetic peptide
  MOD_RES 2: note = Aib
  MOD_RES 6: note = Me-Phe
  MOD_RES 17: note = Aib
  MOD_RES 18: note = Lys(C8)
  MOD_RES 19: note = Ac5c
  REGION 1..19: note = C-term amide
HXQGTFTSDYSKYLDSXKX

SEQ ID NO: 125 - protein, 19 aa, synthetic construct
  REGION 1..19: note = Description of Artificial Sequence: Synthetic peptide
  MOD_RES 2: note = Aib
  MOD_RES 6: note = Me-Phe
  MOD_RES 17: note = Aib
  MOD_RES 18: note = Lys(C12)
  MOD_RES 19: note = Ac5c
  REGION 1..19: note = C-term amide
HXQGTFTSDYSKYLDSXKX

SEQ ID NO: 126 - protein, 19 aa, synthetic construct
  REGION 1..19: note = Description of Artificial Sequence: Synthetic peptide
  MOD_RES 2: note = Aib
  MOD_RES 6: note = Me-Phe
  MOD_RES 17: note = Aib
  MOD_RES 18: note = Lys(C16)
  MOD_RES 19: note = Ac5c
  REGION 1..19: note = C-term amide
HXQGTFTSDYSKYLDSXKX

SEQ ID NO: 127 - protein, 19 aa, synthetic construct
  REGION 1..19: note = Description of Artificial Sequence: Synthetic peptide
  MOD_RES 2: note = Aib
  MOD_RES 17: note = Aib
  MOD_RES 18: note = Lys(C8)
  MOD_RES 19: note = Ac5c
  REGION 1..19: note = C-term amide
HXQGTFTSDYSKYLDSXKX

SEQ ID NO: 128 - protein, 19 aa, synthetic construct
  REGION 1..19: note = Description of Artificial Sequence: Synthetic peptide
  MOD_RES 2: note = Aib
  MOD_RES 17: note = Aib
  MOD_RES 18: note = Lys(C12)
  MOD_RES 19: note = Ac5c
  REGION 1..19: note = C-term amide
HXQGTFTSDYSKYLDSXKX

SEQ ID NO: 129 - protein, 19 aa, synthetic construct
  REGION 1..19: note = Description of Artificial Sequence: Synthetic peptide
  MOD_RES 2: note = Aib
  MOD_RES 17: note = Aib
  MOD_RES 18: note = Lys(C16)
  MOD_RES 19: note = Ac5c
  REGION 1..19: note = C-term amide
HXQGTFTSDYSKYLDSXKX

SEQ ID NO: 130 - protein, 20 aa, synthetic construct
  REGION 1..20: note = Description of Artificial Sequence: Synthetic peptide
  MOD_RES 2: note = Aib
  MOD_RES 6: note = Me-Phe
  MOD_RES 18: note = Aib
  MOD_RES 19: note = Lys(C8)
  MOD_RES 20: note = Aib
  REGION 1..20: note = C-term amide
HXQGTFTSDYSKYLDSRXKX

SEQ ID NO: 131 - protein, 20 aa, synthetic construct
  REGION 1..20: note = Description of Artificial Sequence: Synthetic peptide
  MOD_RES 2: note = Aib
  MOD_RES 6: note = Me-Phe
  MOD_RES 18: note = Aib
  MOD_RES 19: note = Lys(C12)
  MOD_RES 20: note = Aib
  REGION 1..20: note = C-term amide
HXQGTFTSDYSKYLDSRXKX

SEQ ID NO: 132 - protein, 20 aa, synthetic construct
  REGION 1..20: note = Description of Artificial Sequence: Synthetic peptide
  MOD_RES 2: note = Aib
  MOD_RES 6: note = Me-Phe
  MOD_RES 18: note = Aib
  MOD_RES 19: note = Lys(C16)
  MOD_RES 20: note = Aib
  REGION 1..20: note = C-term amide
HXQGTFTSDYSKYLDSRXKX

SEQ ID NO: 133 - protein, 20 aa, synthetic construct
  REGION 1..20: note = Description of Artificial Sequence: Synthetic peptide
  MOD_RES 2: note = Aib
  MOD_RES 6: note = Me-Phe
  MOD_RES 18: note = Aib
  MOD_RES 19: note = Lys(C8)
  MOD_RES 20: note = Ac5c
  REGION 1..20: note = C-term amide
HXQGTFTSDYSKYLDSRXKX

SEQ ID NO: 134 - protein, 20 aa, synthetic construct
  REGION 1..20: note = Description of Artificial Sequence: Synthetic peptide
  MOD_RES 2: note = Aib
  MOD_RES 6: note = Me-Phe
  MOD_RES 18: note = Aib
  MOD_RES 19: note = Lys(C12)
  MOD_RES 20: note = Ac5c
  REGION 1..20: note = C-term amide
HXQGTFTSDYSKYLDSRXKX

SEQ ID NO: 135 - protein, 20 aa, synthetic construct
  REGION 1..20: note = Description of Artificial Sequence: Synthetic peptide
  MOD_RES 2: note = Aib
  MOD_RES 6: note = Me-Phe
  MOD_RES 18: note = Aib
  MOD_RES 19: note = Lys(C16)
  MOD_RES 20: note = Ac5c
  REGION 1..20: note = C-term amide
HXQGTFTSDYSKYLDSRXKX

SEQ ID NO: 136 - protein, 20 aa, synthetic construct
  REGION 1..20: note = Description of Artificial Sequence: Synthetic peptide
  MOD_RES 2: note = Aib
  MOD_RES 18: note = Aib
  MOD_RES 19: note = Lys(C8)
  MOD_RES 20: note = Aib
  REGION 1..20: note = C-term amide
HXQGTFTSDYSKYLDSRXKX

SEQ ID NO: 137 - protein, 20 aa, synthetic construct
  REGION 1..20: note = Description of Artificial Sequence: Synthetic peptide
  MOD_RES 2: note = Aib
  MOD_RES 18: note = Aib
  MOD_RES 19: note = Lys(C12)
  MOD_RES 20: note = Aib
  REGION 1..20: note = C-term amide
HXQGTFTSDYSKYLDSRXKX

SEQ ID NO: 138 - protein, 20 aa, synthetic construct
  REGION 1..20: note = Description of Artificial Sequence: Synthetic peptide
  MOD_RES 2: note = Aib
  MOD_RES 18: note = Aib
  MOD_RES 19: note = Lys(C16)
  MOD_RES 20: note = Aib
  REGION 1..20: note = C-term amide
HXQGTFTSDYSKYLDSRXKX

SEQ ID NO: 139 - protein, 23 aa, synthetic construct
  REGION 1..23: note = Description of Artificial Sequence: Synthetic peptide
  MOD_RES 2: note = Aib
  MOD_RES 6: note = Me-Phe
  MOD_RES 18: note = Aib
  MOD_RES 21: note = Lys(C8)
  MOD_RES 23: note = Aib
  REGION 1..23: note = C-term amide
HXQGTFTSDYSKYLDSRXAQKFX

SEQ ID NO: 140 - protein, 23 aa, synthetic construct
  REGION 1..23: note = Description of Artificial Sequence: Synthetic peptide
  MOD_RES 2: note = Aib
  MOD_RES 6: note = Me-Phe
  MOD_RES 18: note = Aib
  MOD_RES 21: note = Lys(C12)
  MOD_RES 23: note = Aib
  REGION 1..23: note = C-term amide
HXQGTFTSDYSKYLDSRXAQKFX

SEQ ID NO: 141 - protein, 23 aa, synthetic construct
  REGION 1..23: note = Description of Artificial Sequence: Synthetic peptide
  MOD_RES 2: note = Aib
  MOD_RES 6: note = Me-Phe
  MOD_RES 18: note = Aib
  MOD_RES 21: note = Lys(C16)
  MOD_RES 23: note = Aib
  REGION 1..23: note = C-term amide
HXQGTFTSDYSKYLDSRXAQKFX

SEQ ID NO: 142 - protein, 23 aa, synthetic construct
  REGION 1..23: note = Description of Artificial Sequence: Synthetic peptide
  MOD_RES 2: note = Aib
  MOD_RES 6: note = Me-Phe
  MOD_RES 18: note = Aib
  MOD_RES 21: note = Lys(C8)
  MOD_RES 23: note = Aib
  REGION 1..23: note = C-term amide
HXQGTFTSDYSKYLDSRXAQKFX

SEQ ID NO: 143 - protein, 23 aa, synthetic construct
  REGION 1..23: note = Description of Artificial Sequence: Synthetic peptide
  MOD_RES 2: note = Aib
  MOD_RES 6: note = Me-Phe
  MOD_RES 18: note = Aib
  MOD_RES 21: note = Lys(C12)
  MOD_RES 23: note = Aib
  REGION 1..23: note = C-term amide
HXQGTFTSDYSKYLDSRXAQKFX

SEQ ID NO: 144 - protein, 23 aa, synthetic construct
  REGION 1..23: note = Description of Artificial Sequence: Synthetic peptide
  MOD_RES 2: note = Aib
  MOD_RES 6: note = Me-Phe
  MOD_RES 18: note = Aib
  MOD_RES 21: note = Lys(C16)
  MOD_RES 23: note = Aib
  REGION 1..23: note = C-term amide
HXQGTFTSDYSKYLDSRXAQKFX

SEQ ID NO: 145 - protein, 23 aa, synthetic construct
  REGION 1..23: note = Description of Artificial Sequence: Synthetic peptide
  MOD_RES 2: note = Aib
  MOD_RES 6: note = Me-Phe
  MOD_RES 18: note = Aib
  MOD_RES 21: note = Lys(C8)
  MOD_RES 23: note = Ac5c
  REGION 1..23: note = C-term amide
HXQGTFTSDYSKYLDSRXAQKFX

SEQ ID NO: 146 - protein, 23 aa, synthetic construct
  REGION 1..23: note = Description of Artificial Sequence: Synthetic peptide
  MOD_RES 2: note = Aib
  MOD_RES 6: note = Me-Phe
  MOD_RES 18: note = Aib
  MOD_RES 21: note = Lys(C12)
  MOD_RES 23: note = Ac5c
  REGION 1..23: note = C-term amide
HXQGTFTSDYSKYLDSRXAQKFX

SEQ ID NO: 147 - protein, 23 aa, synthetic construct
  REGION 1..23: note = Description of Artificial Sequence: Synthetic peptide
  MOD_RES 2: note = Aib
  MOD_RES 6: note = Me-Phe
  MOD_RES 18: note = Aib
  MOD_RES 21: note = Lys(C16)
  MOD_RES 23: note = Ac5c
  REGION 1..23: note = C-term amide
HXQGTFTSDYSKYLDSRXAQKFX

SEQ ID NO: 148 - protein, 23 aa, synthetic construct
  REGION 1..23: note = Description of Artificial Sequence: Synthetic peptide
  MOD_RES 2: note = Aib
  MOD_RES 6: note = Me-Phe
  REGION 12..16: note = misc_feature - Cyclic
  MOD_RES 12: note = Glu is cyclized through side chain to form a lactam linkage
  MOD_RES 16: note = Lys is cyclized through side chain to form a lactam linkage
  MOD_RES 18: note = Aib
  MOD_RES 21: note = Lys(C8)
  MOD_RES 23: note = Aib
  REGION 1..23: note = C-term amide
HXQGTFTSDYSEYLDKRXAQKFX

SEQ ID NO: 149 - protein, 23 aa, synthetic construct
  REGION 1..23: note = Description of Artificial Sequence: Synthetic peptide
  MOD_RES 2: note = Aib
  MOD_RES 6: note = Me-Phe
  REGION 12..16: note = misc_feature - Cyclic
  MOD_RES 12: note = Glu is cyclized through side chain to form a lactam linkage
  MOD_RES 16: note = Lys is cyclized through side chain to form a lactam linkage
  MOD_RES 18: note = Aib
  MOD_RES 21: note = Lys(C12)
  MOD_RES 23: note = Aib
  REGION 1..23: note = C-term amide
HXQGTFTSDYSEYLDKRXAQKFX

SEQ ID NO: 150 - protein, 23 aa, synthetic construct
  REGION 1..23: note = Description of Artificial Sequence: Synthetic peptide
  MOD_RES 2: note = Aib
  MOD_RES 6: note = Me-Phe
  REGION 12..16: note = misc_feature - Cyclic
  MOD_RES 12: note = Glu is cyclized through side chain to form a lactam linkage
  MOD_RES 16: note = Lys is cyclized through side chain to form a lactam linkage
  MOD_RES 18: note = Aib
  MOD_RES 21: note = Lys(C16)
  MOD_RES 23: note = Aib
  REGION 1..23: note = C-term amide
HXQGTFTSDYSEYLDKRXAQKFX

SEQ ID NO: 151 - protein, 23 aa, synthetic construct
  REGION 1..23: note = Description of Artificial Sequence: Synthetic peptide
  MOD_RES 2: note = Aib
  MOD_RES 6: note = Me-Phe
  REGION 12..16: note = misc_feature - Cyclic
  MOD_RES 12: note = Glu is cyclized through side chain to form a lactam linkage
  MOD_RES 16: note = Lys is cyclized through side chain to form a lactam linkage
  MOD_RES 18: note = Aib
  MOD_RES 21: note = Lys(C8)
  MOD_RES 23: note = Ac5c
  REGION 1..23: note = C-term amide
HXQGTFTSDYSEYLDKRXAQKFX

SEQ ID NO: 152 - protein, 23 aa, synthetic construct
  REGION 1..23: note = Description of Artificial Sequence: Synthetic peptide
  MOD_RES 2: note = Aib
  MOD_RES 6: note = Me-Phe
  REGION 12..16: note = misc_feature - Cyclic
  MOD_RES 12: note = Glu is cyclized through side chain to form a lactam linkage
  MOD_RES 16: note = Lys is cyclized through side chain to form a lactam linkage
  MOD_RES 18: note = Aib
  MOD_RES 21: note = Lys(C12)
  MOD_RES 23: note = Ac5c
  REGION 1..23: note = C-term amide
HXQGTFTSDYSEYLDKRXAQKFX

SEQ ID NO: 153 - protein, 23 aa, synthetic construct
  REGION 1..23: note = Description of Artificial Sequence: Synthetic peptide
  MOD_RES 2: note = Aib
  MOD_RES 6: note = Me-Phe
  REGION 12..16: note = misc_feature - Cyclic
  MOD_RES 12: note = Glu is cyclized through side chain to form a lactam linkage
  MOD_RES 16: note = Lys is cyclized through side chain to form a lactam linkage
  MOD_RES 18: note = Aib
  MOD_RES 21: note = Lys(C16)
  MOD_RES 23: note = Ac5c
  REGION 1..23: note = C-term amide
HXQGTFTSDYSEYLDKRXAQKFX

SEQ ID NO: 154 - protein, 23 aa, synthetic construct
  REGION 1..23: note = Description of Artificial Sequence: Synthetic peptide
  MOD_RES 2: note = Aib
  REGION 12..16: note = misc_feature - Cyclic
  MOD_RES 12: note = Glu is cyclized through side chain to form a lactam linkage
  MOD_RES 16: note = Lys is cyclized through side chain to form a lactam linkage
  MOD_RES 18: note = Aib
  MOD_RES 21: note = Lys(C8)
  MOD_RES 23: note = Ac5c
  REGION 1..23: note = C-term amide
HXQGTFTSDYSEYLDKRXAQKFX

SEQ ID NO: 155 - protein, 23 aa, synthetic construct
  REGION 1..23: note = Description of Artificial Sequence: Synthetic peptide
  MOD_RES 2: note = Aib
  REGION 12..16: note = misc_feature - Cyclic
  MOD_RES 12: note = Glu is cyclized through side chain to form a lactam linkage
  MOD_RES 16: note = Lys is cyclized through side chain to form a lactam linkage
  MOD_RES 18: note = Aib
  MOD_RES 21: note = Lys(C12)
  MOD_RES 23: note = Ac5c
  REGION 1..23: note = C-term amide
HXQGTFTSDYSEYLDKRXAQKFX

SEQ ID NO: 156 - protein, 23 aa, synthetic construct
  REGION 1..23: note = Description of Artificial Sequence: Synthetic peptide
  MOD_RES 2: note = Aib
  MOD_RES 12: note = Glu is cyclized through side chain to form a lactam linkage
  MOD_RES 16: note = Lys is cyclized through side chain to form a lactam linkage
  MOD_RES 18: note = Aib
  MOD_RES 21: note = Lys(C16)
  MOD_RES 23: note = Ac5c
  REGION 1..23: note = C-term amide
HXQGTFTSDYSEYLDKRXAQKFX

SEQ ID NO: 157 - protein, 23 aa, synthetic construct
  REGION 1..23: note = Description of Artificial Sequence: Synthetic peptide
  MOD_RES 2: note = Aib
  REGION 12..16: note = misc_feature - Cyclic
  MOD_RES 12: note = Glu is cyclized through side chain to form a lactam linkage
  MOD_RES 16: note = Lys is cyclized through side chain to form a lactam linkage
  MOD_RES 18: note = Aib
  MOD_RES 21: note = Lys(C8)
  MOD_RES 23: note = Aib
  REGION 1..23: note = C-term amide
HXQGTFTSDYSEYLDKRXAQKFX

SEQ ID NO: 158 - protein, 23 aa, synthetic construct
  REGION 1..23: note = Description of Artificial Sequence: Synthetic peptide
  MOD_RES 2: note = Aib
  REGION 12..16: note = misc_feature - Cyclic
  MOD_RES 12: note = Glu is cyclized through side chain to form a lactam linkage
  MOD_RES 16: note = Lys is cyclized through side chain to form a lactam linkage
  MOD_RES 18: note = Aib
  MOD_RES 21: note = Lys(C12)
  MOD_RES 23: note = Aib
  REGION 1..23: note = C-term amide
HXQGTFTSDYSEYLDKRXAQKFX

SEQ ID NO: 159 - protein, 23 aa, synthetic construct
  REGION 1..23: note = Description of Artificial Sequence: Synthetic peptide
  MOD_RES 2: note = Aib
  REGION 12..16: note = misc_feature - Cyclic
  MOD_RES 12: note = Glu is cyclized through side chain to form a lactam linkage
  MOD_RES 16: note = Lys is cyclized through side chain to form a lactam linkage
  MOD_RES 18: note = Aib
  MOD_RES 21: note = Lys(C16)
  MOD_RES 23: note = Aib
  REGION 1..23: note = C-term amide
HXQGTFTSDYSEYLDKRXAQKFX

SEQ ID NO: 160 - protein, 23 aa, synthetic construct
  REGION 1..23: note = Description of Artificial Sequence: Synthetic peptide
  MOD_RES 2: note = Aib
  MOD_RES 6: note = Me-Phe
  REGION 16..20: note = misc_feature - Cyclic
  MOD_RES 16: note = Glu is cyclized through side chain to form a lactam linkage
  MOD_RES 18: note = Aib
  MOD_RES 20: note = Lys is cyclized through side chain to form a lactam linkage
  MOD_RES 21: note = Lys(C8)
  MOD_RES 23: note = Aib
  REGION 1..23: note = C-term amide
HXQGTFTSDYSKYLDERXAKKFX

SEQ ID NO: 161 - protein, 23 aa, synthetic construct
  REGION 1..23: note = Description of Artificial Sequence: Synthetic peptide
  MOD_RES 2: note = Aib
  MOD_RES 6: note = Me-Phe
  REGION 16..20: note = misc_feature - Cyclic
  MOD_RES 16: note = Glu is cyclized through side chain to form a lactam linkage
  MOD_RES 18: note = Aib
  MOD_RES 20: note = Lys is cyclized through side chain to form a lactam linkage
  MOD_RES 21: note = Lys(C12)
  MOD_RES 23: note = Aib
  REGION 1..23: note = C-term amide
HXQGTFTSDYSKYLDERXAKKFX

SEQ ID NO: 162 - protein, 23 aa, synthetic construct
  REGION 1..23: note = Description of Artificial Sequence: Synthetic peptide
  MOD_RES 2: note = Aib
  MOD_RES 6: note = Me-Phe
  MOD_RES 16: note = Glu is cyclized through side chain to form a lactam linkage
  MOD_RES 18: note = Aib
  MOD_RES 20: note = Lys is cyclized through side chain to form a lactam linkage
  MOD_RES 21: note = Lys(C16)
  MOD_RES 23: note = Aib
  REGION 1..23: note = C-term amide
HXQGTFTSDYSKYLDERXAKKFX

SEQ ID NO: 163 - protein, 23 aa, synthetic construct
  REGION 1..23: note = Description of Artificial Sequence: Synthetic peptide
  MOD_RES 2: note = Aib
  MOD_RES 6: note = Me-Phe
  REGION 16..20: note = misc_feature - Cyclic
  MOD_RES 16: note = Glu is cyclized through side chain to form a lactam linkage
  MOD_RES 18: note = Aib
  MOD_RES 20: note = Lys is cyclized through side chain to form a lactam linkage
  MOD_RES 21: note = Lys(C8)
  MOD_RES 23: note = Ac5c
  REGION 1..23: note = C-term amide
HXQGTFTSDYSKYLDERXAKKFX

SEQ ID NO: 164 - protein, 23 aa, synthetic construct
  REGION 1..23: note = Description of Artificial Sequence: Synthetic peptide
  MOD_RES 2: note = Aib
  MOD_RES 6: note = Me-Phe
  MOD_RES 16: note = Lys is cyclized through side chain to form a lactam linkage
  MOD_RES 18: note = Aib
  MOD_RES 20: note = Lys is cyclized through side chain to form a lactam linkage
  MOD_RES 21: note = Lys(C12)
  MOD_RES 23: note = Ac5c
  REGION 1..23: note = C-term amide
HXQGTFTSDYSKYLDKRXAKKFX

SEQ ID NO: 165 - protein, 23 aa, synthetic construct
  REGION 1..23: note = Description of Artificial Sequence: Synthetic peptide
  MOD_RES 2: note = Aib
  MOD_RES 6: note = Me-Phe
  MOD_RES 16: note = Lys is cyclized through side chain to form a lactam linkage
  MOD_RES 18: note = Aib
  MOD_RES 20: note = Lys is cyclized through side chain to form a lactam linkage
  MOD_RES 21: note = Lys(C16)
  MOD_RES 23: note = Ac5c
  REGION 1..23: note = C-term amide
HXQGTFTSDYSKYLDKRXAKKFX

SEQ ID NO: 166 - protein, 23 aa, synthetic construct
  REGION 1..23: note = Description of Artificial Sequence: Synthetic peptide
  MOD_RES 2: note = Aib
  REGION 16..20: note = misc_feature - Cyclic
  MOD_RES 16: note = Glu is cyclized through side chain to form a lactam linkage
  MOD_RES 18: note = Aib
  MOD_RES 20: note = Lys is cyclized through side chain to form a lactam linkage
  MOD_RES 21: note = Lys(C8)
  MOD_RES 23: note = Aib
  REGION 1..23: note = C-term amide
HXQGTFTSDYSKYLDERXAKKFX

SEQ ID NO: 167 - protein, 23 aa, synthetic construct
  REGION 1..23: note = Description of Artificial Sequence: Synthetic peptide
  MOD_RES 2: note = Aib
  REGION 16..20: note = misc_feature - Cyclic
  MOD_RES 16: note = Glu is cyclized through side chain to form a lactam linkage
  MOD_RES 18: note = Aib
  MOD_RES 20: note = Lys is cyclized through side chain to form a lactam linkage
  MOD_RES 21: note = Lys(C12)
  MOD_RES 23: note = Aib
  REGION 1..23: note = C-term amide
HXQGTFTSDYSKYLDERXAKKFX

SEQ ID NO: 168 - protein, 23 aa, synthetic construct
  REGION 1..23: note = Description of Artificial Sequence: Synthetic peptide
  MOD_RES 2: note = Aib
  REGION 16..20: note = misc_feature - Cyclic
  MOD_RES 16: note = Glu is cyclized through side chain to form a lactam linkage
  MOD_RES 18: note = Aib
  MOD_RES 20: note = Lys is cyclized through side chain to form a lactam linkage
  MOD_RES 21: note = Lys(C16)
  MOD_RES 23: note = Aib
  REGION 1..23: note = C-term amide
HXQGTFTSDYSKYLDERXAKKFX

SEQ ID NO: 169 - protein, 23 aa, synthetic construct
  REGION 1..23: note = Description of Artificial Sequence: Synthetic peptide
  MOD_RES 2: note = Aib
  REGION 16..20: note = misc_feature - Cyclic
  MOD_RES 16: note = Glu is cyclized through side chain to form a lactam linkage
  MOD_RES 18: note = Aib
  MOD_RES 20: note = Lys is cyclized through side chain to form a lactam linkage
  MOD_RES 21: note = Lys(C8)
  MOD_RES 23: note = Ac5c
  REGION 1..23: note = C-term amide
HXQGTFTSDYSKYLDERXAKKFX

SEQ ID NO: 170 - protein, 23 aa, synthetic construct
  REGION 1..23: note = Description of Artificial Sequence: Synthetic peptide
  MOD_RES 2: note = Aib
  MOD_RES 16: note = Lys is cyclized through side chain to form a lactam linkage
  MOD_RES 18: note = Aib
  MOD_RES 20: note = Lys is cyclized through side chain to form a lactam linkage
  MOD_RES 21: note = Lys(C12)
  MOD_RES 23: note = Ac5c
  REGION 1..23: note = C-term amide
HXQGTFTSDYSKYLDKRXAKKFX

SEQ ID NO: 171 - protein, 23 aa, synthetic construct
  REGION 1..23: note = Description of Artificial Sequence: Synthetic peptide
  MOD_RES 2: note = Aib
  MOD_RES 16: note = Lys is cyclized through side chain to form a lactam linkage
  MOD_RES 18: note = Aib
  MOD_RES 20: note = Lys is cyclized through side chain to form a lactam linkage
  MOD_RES 21: note = Lys(C16)
  MOD_RES 23: note = Ac5c
  REGION 1..23: note = C-term amide
HXQGTFTSDYSKYLDKRXAKKFX

SEQ ID NO: 172 - protein, 23 aa, synthetic construct
  REGION 1..23: note = Description of Artificial Sequence: Synthetic peptide
  MOD_RES 2: note = Aib
  REGION 16..20: note = misc_feature - Cyclic
  MOD_RES 16: note = Glu is cyclized through side chain to form a lactam linkage
  MOD_RES 20: note = Lys is cyclized through side chain to form a lactam linkage
  MOD_RES 21: note = Lys(C12)
  MOD_RES 23: note = Aib
  REGION 1..23: note = C-term amide
HXQGTFTSDYSKYLDEQAAKKFX

SEQ ID NO: 173 - protein, 23 aa, synthetic construct
  REGION 1..23: note = Description of Artificial Sequence: Synthetic peptide
  MOD_RES 2: note = Aib
  REGION 16..20: note = misc_feature - Cyclic
  MOD_RES 16: note = Glu is cyclized through side chain to form a lactam linkage
  MOD_RES 20: note = Lys is cyclized through side chain to form a lactam linkage
  MOD_RES 21: note = Lys(C16)
  MOD_RES 23: note = Aib
  REGION 1..23: note = C-term amide
HXQGTFTSDYSKYLDEQAAKKFX

SEQ ID NO: 174 - protein, 23 aa, synthetic construct
  REGION 1..23: note = Description of Artificial Sequence: Synthetic peptide
  MOD_RES 2: note = Aib
  REGION 16..20: note = misc_feature - Cyclic
  MOD_RES 16: note = Glu is cyclized through side chain to form a lactam linkage
  MOD_RES 20: note = Lys is cyclized through side chain to form a lactam linkage
  MOD_RES 21: note = Lys(C12)
  MOD_RES 23: note = Aib
  REGION 1..23: note = C-term amide
HXQGTFTSDYSKYLDERAAKKFX

SEQ ID NO: 175 - protein, 23 aa, synthetic construct
  REGION 1..23: note = Description of Artificial Sequence: Synthetic peptide
  MOD_RES 2: note = Aib
  REGION 16..20: note = misc_feature - Cyclic
  MOD_RES 16: note = Glu is cyclized through side chain to form a lactam linkage
  MOD_RES 20: note = Lys is cyclized through side chain to form a lactam linkage
  MOD_RES 21: note = Lys(C16)
  MOD_RES 23: note = Aib
  REGION 1..23: note = C-term amide
HXQGTFTSDYSKYLDERAAKKFX

SEQ ID NO: 176 - protein, 23 aa, synthetic construct
  REGION 1..23: note = Description of Artificial Sequence: Synthetic peptide
  MOD_RES 2: note = Aib
  REGION 16..20: note = misc_feature - Cyclic
  MOD_RES 16: note = Glu is cyclized through side chain to form a lactam linkage
  MOD_RES 20: note = Lys is cyclized through side chain to form a lactam linkage
  MOD_RES 21: note = Lys(C12)
  MOD_RES 23: note = Ac5c
  REGION 1..23: note = C-term amide
HXQGTFTSDYSKYLDERAAKKFX

SEQ ID NO: 177 - protein, 23 aa, synthetic construct
  REGION 1..23: note = Description of Artificial Sequence: Synthetic peptide
  MOD_RES 2: note = Aib
  REGION 16..20: note = misc_feature - Cyclic
  MOD_RES 16: note = Glu is cyclized through side chain to form a lactam linkage
  MOD_RES 20: note = Lys is cyclized through side chain to form a lactam linkage
  MOD_RES 21: note = Lys(C16)
  MOD_RES 23: note = Ac5c
  REGION 1..23: note = C-term amide
HXQGTFTSDYSKYLDERAAKKFX

SEQ ID NO: 178 - protein, 23 aa, synthetic construct
  REGION 1..23: note = Description of Artificial Sequence: Synthetic peptide
  MOD_RES 2: note = Aib
  REGION 16..20: note = misc_feature - Cyclic
  MOD_RES 16: note = Glu is cyclized through side chain to form a lactam linkage
  MOD_RES 20: note = Lys is cyclized through side chain to form a lactam linkage
  MOD_RES 21: note = Lys(C12)
  MOD_RES 23: note = Ac5c
  REGION 1..23: note = C-term amide
HXQGTFTSDYSKYLDEQAAKKFX

SEQ ID NO: 179 - protein, 23 aa, synthetic construct
  REGION 1..23: note = Description of Artificial Sequence: Synthetic peptide
  MOD_RES 2: note = Aib
  REGION 16..20: note = misc_feature - Cyclic
  MOD_RES 16: note = Glu is cyclized through side chain to form a lactam linkage
  MOD_RES 20: note = Lys is cyclized through side chain to form a lactam linkage
  MOD_RES 21: note = Lys(C12)
  MOD_RES 23: note = Aib
  REGION 1..23: note = C-term amide
HXQGTFTSDYSRYLDERAAKKFX

SEQ ID NO: 180 - protein, 19 aa, synthetic construct
  REGION 1..19: note = Description of Artificial Sequence: Synthetic peptide
  MOD_RES 2: note = Aib
  MOD_RES 17: note = Aib
  MOD_RES 18: note = Lys(C12)
  MOD_RES 19: note = Aib
  REGION 1..19: note = C-term amide
HXQGTFTSDYSKYLDSXKX

SEQ ID NO: 181 - protein, 19 aa, synthetic construct
  REGION 1..19: note = Description of Artificial Sequence: Synthetic peptide
  MOD_RES 2: note = Aib
  MOD_RES 18: note = Lys(C12)
  MOD_RES 19: note = Aib
  REGION 1..19: note = C-term amide
HXQGTFTSDYSKYLDSRKX

SEQ ID NO: 182 - protein, 19 aa, synthetic construct
  REGION 1..19: note = Description of Artificial Sequence: Synthetic peptide
  MOD_RES 2: note = Aib
  MOD_RES 18: note = Lys(C12)
  MOD_RES 19: note = Ac5c
  REGION 1..19: note = C-term amide
HXQGTFTSDYSKYLDSRKX

SEQ ID NO: 183 - protein, 19 aa, synthetic construct
  REGION 1..19: note = Description of Artificial Sequence: Synthetic peptide
  MOD_RES 2: note = Aib
  MOD_RES 18: note = Lys(C8)
  MOD_RES 19: note = Aib
  REGION 1..19: note = C-term amide
HXQGTFTSDYSKYLDSRKX

SEQ ID NO: 184 - protein, 19 aa, synthetic construct
  REGION 1..19: note = Description of Artificial Sequence: Synthetic peptide
  MOD_RES 2: note = Aib
  MOD_RES 18: note = Lys(C16)
  MOD_RES 19: note = Aib
  REGION 1..19: note = C-term amide
HXQGTFTSDYSKYLDSRKX

SEQ ID NO: 185 - protein, 19 aa, synthetic construct
  REGION 1..19: note = Description of Artificial Sequence: Synthetic peptide
  MOD_RES 2: note = Aib
  MOD_RES 17: note = Aib
  MOD_RES 18: note = Lys(C12)
  MOD_RES 19: note = Aib
  REGION 1..19: note = C-term amide
HXQGTFTSDYSKYLDSXKX

SEQ ID NO: 186 - protein, 19 aa, synthetic construct
  REGION 1..19: note = Description of Artificial Sequence: Synthetic peptide
  MOD_RES 2: note = Aib
  MOD_RES 17: note = Aib
  MOD_RES 18: note = Lys(C8)
  MOD_RES 19: note = Aib
  REGION 1..19: note = C-term amide
HXQGTFTSDYSKYLDSXKX

SEQ ID NO: 187 - protein, 19 aa, synthetic construct
  REGION 1..19: note = Description of Artificial Sequence: Synthetic peptide
  MOD_RES 2: note = Aib
  MOD_RES 17: note = Aib
  MOD_RES 18: note = Lys(C1)
  MOD_RES 19: note = Aib
  REGION 1..19: note = C-term amide
HXQGTFTSDYSKYLDSXKX

SEQ ID NO: 188 - protein, 19 aa, synthetic construct
  REGION 1..19: note = Description of Artificial Sequence: Synthetic peptide
  MOD_RES 2: note = Aib
  MOD_RES 17: note = Aib
  MOD_RES 18: note = Lys(C16)
  MOD_RES 19: note = Aib
  REGION 1..19: note = C-term amide
HXQGTFTSDYSKYLDSXKX

SEQ ID NO: 189 - protein, 19 aa, synthetic construct
  REGION 1..19: note = Description of Artificial Sequence: Synthetic peptide
  MOD_RES 2: note = Aib
  MOD_RES 12: note = Lys is cyclized through side chain to form a lactam linkage
  REGION 16..19: note = misc_feature - Cyclic
  MOD_RES 16: note = Glu is cyclized through side chain to form a lactam linkage
  MOD_RES 17: note = Aib
  MOD_RES 18: note = Lys(C16)
  MOD_RES 19: note = Aib
  REGION 1..19: note = C-term amide
HXQGTFTSDYSKYLDEXKX

SEQ ID NO: 190 - protein, 19 aa, synthetic construct
  REGION 1..19: note = Description of Artificial Sequence: Synthetic peptide
  MOD_RES 2: note = Aib
  MOD_RES 12: note = Lys is cyclized through side chain to form a lactam linkage
  REGION 16..19: note = misc_feature - Cyclic
  MOD_RES 16: note = Glu is cyclized through side chain to form a lactam linkage
  MOD_RES 17: note = Aib
  MOD_RES 18: note = Lys(C12)
  MOD_RES 19: note = Aib
  REGION 1..19: note = C-term amide
HXQGTFTSDYSKYLDEXKX

SEQ ID NO: 191 - protein, 19 aa, synthetic construct
  REGION 1..19: note = Description of Artificial Sequence: Synthetic peptide
  MOD_RES 2: note = Aib
  MOD_RES 12: note = Lys is cyclized through side chain to form a lactam linkage
  REGION 16..19: note = misc_feature - Cyclic
  MOD_RES 16: note = Glu is cyclized through side chain to form a lactam linkage
  MOD_RES 17: note = Aib
  MOD_RES 18: note = Lys(C8)
  MOD_RES 19: note = Aib
  REGION 1..19: note = C-term amide
HXQGTFTSDYSKYLDEXKX

SEQ ID NO: 192 - protein, 19 aa, synthetic construct
  REGION 1..19: note = Description of Artificial Sequence: Synthetic peptide
  MOD_RES 2: note = Aib
  MOD_RES 12: note = Lys is cyclized through side chain to form a lactam linkage
  REGION 16..19: note = misc_feature - Cyclic
  MOD_RES 16: note = Glu is cyclized through side chain to form a lactam linkage
  MOD_RES 18: note = Lys(C16)
  MOD_RES 19: note = Aib
  REGION 1..19: note = C-term amide
HXQGTFTSDYSKYLDERKX

SEQ ID NO: 193 - protein, 19 aa, synthetic construct
  REGION 1..19: note = Description of Artificial Sequence: Synthetic peptide
  MOD_RES 2: note = Aib
  MOD_RES 12: note = Lys is cyclized through side chain to form a lactam linkage
  REGION 16..19: note = misc_feature - Cyclic
  MOD_RES 16: note = Glu is cyclized through side chain to form a lactam linkage
  MOD_RES 18: note = Lys(C12)
  MOD_RES 19: note = Aib
  REGION 1..19: note = C-term amide
HXQGTFTSDYSKYLDERKX

SEQ ID NO: 194 - protein, 19 aa, synthetic construct
  REGION 1..19: note = Description of Artificial Sequence: Synthetic peptide
  MOD_RES 2: note = Aib
  MOD_RES 12: note = Lys is cyclized through side chain to form a lactam linkage
  REGION 16..19: note = misc_feature - Cyclic
  MOD_RES 16: note = Glu is cyclized through side chain to form a lactam linkage
  MOD_RES 18: note = Lys(C8)
  MOD_RES 19: note = Aib
  REGION 1..19: note = C-term amide
HXQGTFTSDYSKYLDERKX

SEQ ID NO: 195 - protein, 19 aa, synthetic construct
  REGION 1..19: note = Description of Artificial Sequence: Synthetic peptide
  MOD_RES 2: note = Aib
  MOD_RES 12: note = Lys is cyclized through side chain to form a lactam linkage
  REGION 16..19: note = misc_feature - Cyclic
  MOD_RES 16: note = Glu is cyclized through side chain to form a lactam linkage
  MOD_RES 18: note = Lys(C12)
  MOD_RES 19: note = Ac5c
  REGION 1..19: note = C-term amide
HXQGTFTSDYSKYLDERKX

SEQ ID NO: 196 - protein, 18 aa, synthetic construct
  REGION 1..18: note = Description of Artificial Sequence: Synthetic peptide
  MOD_RES 2: note = Aib
  MOD_RES 17: note = Aib
  MOD_RES 18: note = Lys(C8)
  REGION 1..18: note = C-term amide
HXQGTFTSDYSKYLDRXK

SEQ ID NO: 197 - protein, 18 aa, synthetic construct
  REGION 1..18: note = Description of Artificial Sequence: Synthetic peptide
  MOD_RES 2: note = Aib
  MOD_RES 17: note = Aib
  MOD_RES 18: note = Lys(C12)
  REGION 1..18: note = C-term amide
HXQGTFTSDYSKYLDRXK

SEQ ID NO: 198 - protein, 18 aa, synthetic construct
  REGION 1..18: note = Description of Artificial Sequence: Synthetic peptide
  MOD_RES 2: note = Aib
  MOD_RES 17: note = Aib
  MOD_RES 18: note = Lys(C16)
  REGION 1..18: note = C-term amide
HXQGTFTSDYSKYLDRXK

SEQ ID NO: 199 - protein, 19 aa, synthetic construct
  REGION 1..19: note = Description of Artificial Sequence: Synthetic peptide
  MOD_RES 2: note = Aib
  MOD_RES 18: note = Aib
  MOD_RES 19: note = Lys(C8)
  REGION 1..19: note = C-term amide
HXQGTFTSDYSKYLDSRXK

SEQ ID NO: 200 - protein, 19 aa, synthetic construct
  REGION 1..19: note = Description of Artificial Sequence: Synthetic peptide
  MOD_RES 2: note = Aib
  MOD_RES 18: note = Aib
  MOD_RES 19: note = Lys(C12)
  REGION 1..19: note = C-term amide
HXQGTFTSDYSKYLDSRXK

SEQ ID NO: 201 - protein, 19 aa, synthetic construct
  REGION 1..19: note = Description of Artificial Sequence: Synthetic peptide
  MOD_RES 2: note = Aib
  MOD_RES 18: note = Aib
  MOD_RES 19: note = Lys(C16)
  REGION 1..19: note = C-term amide
HXQGTFTSDYSKYLDSRXK

SEQ ID NO: 202 - protein, 19 aa, synthetic construct
  REGION 1..19: note = Description of Artificial Sequence: Synthetic peptide
  MOD_RES 2: note = Aib
  MOD_RES 16: note = Aib
  MOD_RES 18: note = Aib
  MOD_RES 19: note = Lys(C8)
  REGION 1..19: note = C-term amide
HXQGTFTSDYSKYLDXRXK

SEQ ID NO: 203 - protein, 19 aa, synthetic construct
  REGION 1..19: note = Description of Artificial Sequence: Synthetic peptide
  MOD_RES 2: note = Aib
  MOD_RES 16: note = Aib
  MOD_RES 18: note = Aib
  MOD_RES 19: note = Lys(C12)
  REGION 1..19: note = C-term amide
HXQGTFTSDYSKYLDXRXK

SEQ ID NO: 204 - protein, 19 aa, synthetic construct
  REGION 1..19: note = Description of Artificial Sequence: Synthetic peptide
  MOD_RES 2: note = Aib
  MOD_RES 16: note = Aib
  MOD_RES 18: note = Aib
  MOD_RES 19: note = Lys(C16)
  REGION 1..19: note = C-term amide
HXQGTFTSDYSKYLDXRXK

SEQ ID NO: 205 - protein, 18 aa, synthetic construct
  REGION 1..18: note = Description of Artificial Sequence: Synthetic peptide
  MOD_RES 2: note = Aib
  MOD_RES 17: note = Aib
  MOD_RES 18: note = Lys(C8)
  REGION 1..18: note = C-term amide
HXQGTFTSDVSSYLERXK

SEQ ID NO: 206 - protein, 18 aa, synthetic construct
  REGION 1..18: note = Description of Artificial Sequence: Synthetic peptide
  MOD_RES 2: note = Aib
  MOD_RES 17: note = Aib
  MOD_RES 18: note = Lys(C12)
  REGION 1..18: note = C-term amide
HXQGTFTSDVSSYLERXK

SEQ ID NO: 207 - protein, 18 aa, synthetic construct
  REGION 1..18: note = Description of Artificial Sequence: Synthetic peptide
  MOD_RES 2: note = Aib
  MOD_RES 17: note = Aib
  MOD_RES 18: note = Lys(C16)
  REGION 1..18: note = C-term amide
HXQGTFTSDVSSYLERXK

SEQ ID NO: 208 - protein, 19 aa, synthetic construct
  REGION 1..19: note = Description of Artificial Sequence: Synthetic peptide
  MOD_RES 2: note = Aib
  MOD_RES 16: note = Aib
  MOD_RES 18..19: note = Lys(C8)
  REGION 1..19: note = C-term amide
HXQGTFTSDVSSYLEXRKK

SEQ ID NO: 209 - protein, 19 aa, synthetic construct
  REGION 1..19: note = Description of Artificial Sequence: Synthetic peptide
  MOD_RES 2: note = Aib
  MOD_RES 16: note = Aib
  MOD_RES 18..19: note = Lys(C12)
  REGION 1..19: note = C-term amide
HXQGTFTSDVSSYLEXRKK

SEQ ID NO: 210 - protein, 19 aa, synthetic construct
  REGION 1..19: note = Description of Artificial Sequence: Synthetic peptide
  MOD_RES 2: note = Aib
  MOD_RES 16: note = Aib
  MOD_RES 18..19: note = Lys(C16)
  REGION 1..19: note = C-term amide
HXQGTFTSDVSSYLEXRKK

SEQ ID NO: 211 - protein, 18 aa, synthetic construct
  REGION 1..18: note = Description of Artificial Sequence: Synthetic peptide
  MOD_RES 2: note = Aib
  MOD_RES 16: note = hArg
  MOD_RES 17: note = Aib
  MOD_RES 18: note = Lys(C8)
  REGION 1..18: note = C-term amide
HXQGTFTSDYSKYLDRXK

SEQ ID NO: 212 - protein, 18 aa, synthetic construct
  REGION 1..18: note = Description of Artificial Sequence: Synthetic peptide
  MOD_RES 2: note = Aib
  MOD_RES 16: note = hArg
  MOD_RES 17: note = Aib
  MOD_RES 18: note = Lys(C12)
  REGION 1..18: note = C-term amide
HXQGTFTSDYSKYLDRXK

SEQ ID NO: 213 - protein, 18 aa, synthetic construct
  REGION 1..18: note = Description of Artificial Sequence: Synthetic peptide
  MOD_RES 2: note = Aib
  MOD_RES 16: note = hArg
  MOD_RES 17: note = Aib
  MOD_RES 18: note = Lys(C16)
  REGION 1..18: note = C-term amide
HXQGTFTSDYSKYLDRXK

SEQ ID NO: 214 - protein, 19 aa, synthetic construct
  REGION 1..19: note = Description of Artificial Sequence: Synthetic peptide
  MOD_RES 2: note = Aib
  MOD_RES 16: note = Aib
  MOD_RES 17: note = hArg
  MOD_RES 18: note = Aib
  MOD_RES 19: note = Lys(C8)
  REGION 1..19: note = C-term amide
HXQGTFTSDYSKYLDXRXK

SEQ ID NO: 215 - protein, 19 aa, synthetic construct
  REGION 1..19: note = Description of Artificial Sequence: Synthetic peptide
  MOD_RES 2: note = Aib
  MOD_RES 16: note = Aib
  MOD_RES 17: note = hArg
  MOD_RES 18: note = Aib
  MOD_RES 19: note = Lys(C12)
  REGION 1..19: note = C-term amide
HXQGTFTSDYSKYLDXRXK

SEQ ID NO: 216 - protein, 19 aa, synthetic construct
  REGION 1..19: note = Description of Artificial Sequence: Synthetic peptide
  MOD_RES 2: note = Aib
  MOD_RES 16: note = Aib
  MOD_RES 17: note = hArg
  MOD_RES 18: note = Aib
  MOD_RES 19: note = Lys(C16)
  REGION 1..19: note = C-term amide
HXQGTFTSDYSKYLDXRXK

SEQ ID NO: 217 - protein, 18 aa, synthetic construct
  REGION 1..18: note = Description of Artificial Sequence: Synthetic peptide
  MOD_RES 2: note = Aib
  MOD_RES 16: note = hArg
  MOD_RES 17: note = Aib
  MOD_RES 18: note = Lys(C8)
  REGION 1..18: note = C-term amide
HXQGTFTSDVSSYLERXK

SEQ ID NO: 218 - protein, 18 aa, synthetic construct
  REGION 1..18: note = Description of Artificial Sequence: Synthetic peptide
  MOD_RES 2: note = Aib
  MOD_RES 16: note = hArg
  MOD_RES 17: note = Aib
  MOD_RES 18: note = Lys(C12)
  REGION 1..18: note = C-term amide
HXQGTFTSDVSSYLERXK

SEQ ID NO: 219 - protein, 22 aa, synthetic construct
  REGION 1..22: note = Description of Artificial Sequence: Synthetic peptide
  MOD_RES 21: note = Lys(C12)
  MOD_RES 22: note = Aib
  REGION 1..22: note = C-term amide
HSQGTFTSDYSKYLDSRRAQKX

SEQ ID NO: 220 - protein, 21 aa, synthetic construct
  REGION 1..21: note = Description of Artificial Sequence: Synthetic peptide
  MOD_RES 20: note = Lys(C12)
  MOD_RES 21: note = Aib
  REGION 1..21: note = C-term amide
HSQGTFTSDYSKYLDSRRAKX

SEQ ID NO: 221 - protein, 20 aa, synthetic construct
  REGION 1..20: note = Description of Artificial Sequence: Synthetic peptide
  MOD_RES 19: note = Lys(C12)
  MOD_RES 20: note = Aib
  REGION 1..20: note = C-term amide
HSQGTFTSDYSKYLDSRRKX

SEQ ID NO: 222 - protein, 19 aa, synthetic construct
  REGION 1..19: note = Description of Artificial Sequence: Synthetic peptide
  MOD_RES 18: note = Lys(C12)
  MOD_RES 19: note = Aib
  REGION 1..19: note = C-term amide
HSQGTFTSDYSKYLDSRKX

SEQ ID NO: 223 - protein, 18 aa, synthetic construct
  REGION 1..18: note = Description of Artificial Sequence: Synthetic peptide
  MOD_RES 17: note = Lys(C12)
  MOD_RES 18: note = Aib
  REGION 1..18: note = C-term amide
HSQGTFTSDYSKYLDSKX

SEQ ID NO: 224 - protein, 17 aa, synthetic construct
  REGION 1..17: note = Description of Artificial Sequence: Synthetic peptide
  MOD_RES 16: note = Lys(C12)
  MOD_RES 17: note = Aib
  REGION 1..17: note = C-term amide
HSQGTFTSDYSKYLDKX

SEQ ID NO: 225 - protein, 29 aa, synthetic construct
  REGION 1..29: note = Description of Artificial Sequence: Synthetic peptide
  MOD_RES 2: note = Aib
  REGION 16..20: note = misc_feature - Cyclic
  MOD_RES 16: note = Glu is cyclized through side chain to form a lactam linkage
  MOD_RES 20: note = Lys is cyclized through side chain to form a lactam linkage
  MOD_RES 24: note = Lys(C12)
  REGION 1..29: note = C-term amide
HXQGTFTSDYSKYLDEQAAKEFIKWLMNT

SEQ ID NO: 226 - protein, 21 aa, synthetic construct
  REGION 1..21: note = Description of Artificial Sequence: Synthetic peptide
  MOD_RES 21: note = Lys(C12)
  REGION 1..21: note = C-term amide
HSQGTFTSDYSKYLDSRRAQK

SEQ ID NO: 227 - protein, 20 aa, synthetic construct
  REGION 1..20: note = Description of Artificial Sequence: Synthetic peptide
  MOD_RES 20: note = Lys(C12)
  REGION 1..20: note = C-term amide
HSQGTFTSDYSKYLDSRRAK

SEQ ID NO: 228 - protein, 19 aa, synthetic construct
  REGION 1..19: note = Description of Artificial Sequence: Synthetic peptide
  MOD_RES 19: note = Lys(C12)
  REGION 1..19: note = C-term amide
HSQGTFTSDYSKYLDSRRK

SEQ ID NO: 229 - protein, 18 aa, synthetic construct
  REGION 1..18: note = Description of Artificial Sequence: Synthetic peptide
  MOD_RES 18: note = Lys(C12)
  REGION 1..18: note = C-term amide
HSQGTFTSDYSKYLDSRK

SEQ ID NO: 230 - protein, 17 aa, synthetic construct
  REGION 1..17: note = Description of Artificial Sequence: Synthetic peptide
  MOD_RES 17: note = Lys(C12)
  REGION 1..17: note = C-term amide
HSQGTFTSDYSKYLDSK

SEQ ID NO: 231 - protein, 16 aa, synthetic construct
  REGION 1..16: note = Description of Artificial Sequence: Synthetic peptide
  MOD_RES 16: note = Lys(C12)
  REGION 1..16: note = C-term amide
HSQGTFTSDYSKYLDK

SEQ ID NO: 232 - protein, 21 aa, synthetic construct
  REGION 1..21: note = Description of Artificial Sequence: Synthetic peptide
  MOD_RES 20: note = Lys(C12)
  MOD_RES 21: note = Aib
  REGION 1..21: note = C-term amide
HAEGTFTSDVSSYLEGQAAKX

SEQ ID NO: 233 - protein, 20 aa, synthetic construct
  REGION 1..20: note = Description of Artificial Sequence: Synthetic peptide
  MOD_RES 19: note = Lys(C12)
  MOD_RES 20: note = Aib
  REGION 1..20: note = C-term amide
HAEGTFTSDVSSYLEGQAKX

SEQ ID NO: 234 - protein, 19 aa, synthetic construct
  REGION 1..19: note = Description of Artificial Sequence: Synthetic peptide
  MOD_RES 18: note = Lys(C12)
  MOD_RES 19: note = Aib
  REGION 1..19: note = C-term amide
HAEGTFTSDVSSYLEGQKX

SEQ ID NO: 235 - protein, 18 aa, synthetic construct
  REGION 1..18: note = Description of Artificial Sequence: Synthetic peptide
  MOD_RES 17: note = Lys(C12)
  MOD_RES 18: note = Aib
  REGION 1..18: note = C-term amide
HAEGTFTSDVSSYLEGKX

SEQ ID NO: 236 - protein, 17 aa, synthetic construct
  REGION 1..17: note = Description of Artificial Sequence: Synthetic peptide
  MOD_RES 16: note = Lys(C12)
  MOD_RES 17: note = Aib
  REGION 1..17: note = C-term amide
HAEGTFTSDVSSYLEKX

SEQ ID NO: 237 - protein, 16 aa, synthetic construct
  REGION 1..16: note = Description of Artificial Sequence: Synthetic peptide
  MOD_RES 15: note = Lys(C12)
  MOD_RES 16: note = Aib
  REGION 1..16: note = C-term amide
HAEGTFTSDVSSYLKX

SEQ ID NO: 238 - protein, 17 aa, synthetic construct
  REGION 1..17: note = Description of Artificial Sequence: Synthetic peptide
  MOD_RES 2: note = Aib
  MOD_RES 16: note = Lys(C12)
  MOD_RES 17: note = Aib
  REGION 1..17: note = C-term amide
HXQGTFTSDYSKYLDKX

SEQ ID NO: 239 - protein, 17 aa, synthetic construct
  REGION 1..17: note = Description of Artificial Sequence: Synthetic peptide
  MOD_RES 2: note = Aib
  MOD_RES 16: note = Lys(C12)
  MOD_RES 17: note = Ac4c
  REGION 1..17: note = C-term amide
HXQGTFTSDYSKYLDKX

SEQ ID NO: 240 - protein, 19 aa, synthetic construct
  REGION 1..19: note = Description of Artificial Sequence: Synthetic peptide
  MOD_RES 2: note = Aib
  MOD_RES 16: note = Lys(C12)
  MOD_RES 19: note = Aib
  REGION 1..19: note = C-term amide
HXQGTFTSDYSKYLDKRRX

SEQ ID NO: 241 - protein, 18 aa, synthetic construct
  REGION 1..18: note = Description of Artificial Sequence: Synthetic peptide
  MOD_RES 2: note = Aib
  MOD_RES 16: note = Lys(C12)
  MOD_RES 17: note = Aib
  REGION 1..18: note = C-term amide
HXQGTFTSDYSKYLDKXR

SEQ ID NO: 242 - protein, 18 aa, synthetic construct
  REGION 1..18: note = Description of Artificial Sequence: Synthetic peptide
  MOD_RES 2: note = Aib
  MOD_RES 16: note = Lys(C12)
  MOD_RES 18: note = Aib
  REGION 1..18: note = C-term amide
HXQGTFTSDYSKYLDKRX

SEQ ID NO: 243 - protein, 18 aa, synthetic construct
  REGION 1..18: note = Description of Artificial Sequence: Synthetic peptide
  MOD_RES 2: note = Aib
  MOD_RES 16: note = Lys(C12)
  MOD_RES 17: note = hArg
  MOD_RES 18: note = Aib
  REGION 1..18: note = C-term amide
HXQGTFTSDYSKYLDKRX

SEQ ID NO: 244 - protein, 18 aa, synthetic construct
  REGION 1..18: note = Description of Artificial Sequence: Synthetic peptide
  MOD_RES 2: note = Aib
  MOD_RES 17: note = Lys(C12)
  MOD_RES 18: note = Aib
  REGION 1..18: note = C-term amide
HXQGTFTSDYSKYLDSKX

SEQ ID NO: 245 - protein, 18 aa, synthetic construct
  REGION 1..18: note = Description of Artificial Sequence: Synthetic peptide
  MOD_RES 2: note = Aib
  MOD_RES 17: note = Lys(C12)
  MOD_RES 18: note = Ac4c
  REGION 1..18: note = C-term amide
HXQGTFTSDYSKYLDSKX

SEQ ID NO: 246 - protein, 19 aa, synthetic construct
  REGION 1..19: note = Description of Artificial Sequence: Synthetic peptide
  MOD_RES 2: note = Aib
  MOD_RES 17: note = Lys(C12)
  MOD_RES 19: note = Aib
  REGION 1..19: note = C-term amide
HXQGTFTSDYSKYLDSKRX

SEQ ID NO: 247 - protein, 19 aa, synthetic construct
  REGION 1..19: note = Description of Artificial Sequence: Synthetic peptide
  MOD_RES 2: note = Aib
  MOD_RES 17: note = Lys(C12)
  MOD_RES 18: note = hArg
  MOD_RES 19: note = Aib
  REGION 1..19: note = C-term amide
HXQGTFTSDYSKYLDSKRX

SEQ ID NO: 248 - protein, 19 aa, synthetic construct
  REGION 1..19: note = Description of Artificial Sequence: Synthetic peptide
  MOD_RES 2: note = Aib
  MOD_RES 18: note = Lys(C12)
  MOD_RES 19: note = Aib
  REGION 1..19: note = C-term amide
HXQGTFTSDYSKYLDSRKX

SEQ ID NO: 249 - protein, 19 aa, synthetic construct
  REGION 1..19: note = Description of Artificial Sequence: Synthetic peptide
  MOD_RES 2: note = Aib
  MOD_RES 18: note = Lys(C12)
  MOD_RES 19: note = Ac4c
  REGION 1..19: note = C-term amide
HXQGTFTSDYSKYLDSRKX

SEQ ID NO: 250 - protein, 19 aa, synthetic construct
  REGION 1..19: note = Description of Artificial Sequence: Synthetic peptide
  MOD_RES 2: note = Aib
  MOD_RES 17: note = hArg
  MOD_RES 18: note = Lys(C12)
  MOD_RES 19: note = Aib
  REGION 1..19: note = C-term amide
HXQGTFTSDYSKYLDSRKX

SEQ ID NO: 251 - protein, 19 aa, synthetic construct
  REGION 1..19: note = Description of Artificial Sequence: Synthetic peptide
  MOD_RES 2: note = Aib
  MOD_RES 16: note = Aib
  MOD_RES 18: note = Lys(C12)
  MOD_RES 19: note = Aib
  REGION 1..19: note = C-term amide
HXQGTFTSDYSKYLDXRKX

SEQ ID NO: 252 - protein, 19 aa, synthetic construct
  REGION 1..19: note = Description of Artificial Sequence: Synthetic peptide
  MOD_RES 2: note = Aib
  MOD_RES 18: note = Lys(C14)
  MOD_RES 19: note = Aib
  REGION 1..19: note = C-term amide
HXQGTFTSDYSKYLDSRKX

SEQ ID NO: 253 - protein, 19 aa, synthetic construct
  REGION 1..19: note = Description of Artificial Sequence: Synthetic peptide
  MOD_RES 2: note = Aib
  MOD_RES 18: note = Lys(C16)
  MOD_RES 19: note = Aib
  REGION 1..19: note = C-term amide
HXQGTFTSDYSKYLDSRKX

SEQ ID NO: 254 - protein, 19 aa, synthetic construct
  REGION 1..19: note = Description of Artificial Sequence: Synthetic peptide
  MOD_RES 2: note = Aib
  MOD_RES 18: note = Lys(C18)
  MOD_RES 19: note = Aib
  REGION 1..19: note = C-term amide
HXQGTFTSDYSKYLDSRKX

SEQ ID NO: 255 - protein, 19 aa, synthetic construct
  REGION 1..19: note = Description of Artificial Sequence: Synthetic peptide
  MOD_RES 2: note = Aib
  MOD_RES 16: note = Aib
  MOD_RES 18: note = Lys(C12)
  MOD_RES 19: note = Aib
  REGION 1..19: note = C-term amide
HXQGTFTSDYSKYLDXQKX

SEQ ID NO: 256 - protein, 20 aa, synthetic construct
  REGION 1..20: note = Description of Artificial Sequence: Synthetic peptide
  MOD_RES 2: note = Aib
  REGION 16..20: note = misc_feature - Cyclic
  MOD_RES 16: note = Glu is cyclized through side chain to form a lactam linkage
  MOD_RES 18: note = Lys(C12)
  MOD_RES 20: note = Lys is cyclized through side chain to form a lactam linkage
  REGION 1..20: note = C-term amide
HXQGTFTSDYSKYLDEQKAK

SEQ ID NO: 257 - protein, 20 aa, synthetic construct
  REGION 1..20: note = Description of Artificial Sequence: Synthetic peptide
  MOD_RES 2: note = Aib
  REGION 16..20: note = misc_feature - Cyclic
  MOD_RES 16: note = Glu is cyclized through side chain to form a lactam linkage
  MOD_RES 18: note = Lys(C14)
  MOD_RES 20: note = Lys is cyclized through side chain to form a lactam linkage
  REGION 1..20: note = C-term amide
HXQGTFTSDYSKYLDEQKAK

SEQ ID NO: 258 - protein, 20 aa, synthetic construct
  REGION 1..20: note = Description of Artificial Sequence: Synthetic peptide
  MOD_RES 2: note = Aib
  REGION 16..20: note = misc_feature - Cyclic
  MOD_RES 16: note = Glu is cyclized through side chain to form a lactam linkage
  MOD_RES 18: note = Lys(C16)
  MOD_RES 20: note = Lys is cyclized through side chain to form a lactam linkage
  REGION 1..20: note = C-term amide
HXQGTFTSDYSKYLDEQKAK

SEQ ID NO: 259 - protein, 20 aa, synthetic construct
  REGION 1..20: note = Description of Artificial Sequence: Synthetic peptide
  MOD_RES 2: note = Aib
  REGION 16..20: note = misc_feature - Cyclic
  MOD_RES 16: note = Glu is cyclized through side chain to form a lactam linkage
  MOD_RES 18: note = Lys(C18)
  MOD_RES 20: note = Lys is cyclized through side chain to form a lactam linkage
  REGION 1..20: note = C-term amide
HXQGTFTSDYSKYLDEQKAK

SEQ ID NO: 260 - protein, 20 aa, synthetic construct
  REGION 1..20: note = Description of Artificial Sequence: Synthetic peptide
  MOD_RES 2: note = Aib
  REGION 16..20: note = misc_feature - Cyclic
  MOD_RES 16: note = Glu is cyclized through side chain to form a lactam linkage
  MOD_RES 18: note = Lys(C20)
  MOD_RES 20: note = Lys is cyclized through side chain to form a lactam linkage
  REGION 1..20: note = C-term amide
HXQGTFTSDYSKYLDEQKAK

SEQ ID NO: 261 - protein, 20 aa, synthetic construct
  REGION 1..20: note = Description of Artificial Sequence: Synthetic peptide
  MOD_RES 2: note = Aib
  MOD_RES 18: note = Lys(C12)
  MOD_RES 19..20: note = Aib
  REGION 1..20: note = C-term amide
HXQGTFTSDYSKYLDSRKXX

SEQ ID NO: 262 - protein, 20 aa, synthetic construct
  REGION 1..20: note = Description of Artificial Sequence: Synthetic peptide
  MOD_RES 2: note = Aib
  MOD_RES 18: note = Lys(C14)
  MOD_RES 19..20: note = Aib
  REGION 1..20: note = C-term amide
HXQGTFTSDYSKYLDSRKXX

SEQ ID NO: 263 - protein, 20 aa, synthetic construct
  REGION 1..20: note = Description of Artificial Sequence: Synthetic peptide
  MOD_RES 2: note = Aib
  MOD_RES 18: note = Lys(C16)
  MOD_RES 19..20: note = Aib
  REGION 1..20: note = C-term amide
HXQGTFTSDYSKYLDSRKXX

SEQ ID NO: 264 - protein, 20 aa, synthetic construct
  REGION 1..20: note = Description of Artificial Sequence: Synthetic peptide
  MOD_RES 2: note = Aib
  MOD_RES 18: note = Lys(C18)
  MOD_RES 19..20: note = Aib
  REGION 1..20: note = C-term amide
HXQGTFTSDYSKYLDSRKXX

SEQ ID NO: 265 - protein, 20 aa, synthetic construct
  REGION 1..20: note = Description of Artificial Sequence: Synthetic peptide
  MOD_RES 2: note = Aib
  MOD_RES 18: note = Lys(C20)
  MOD_RES 19..20: note = Aib
  REGION 1..20: note = C-term amide
HXQGTFTSDYSKYLDSRKXX

SEQ ID NO: 266 - skipped

SEQ ID NO: 267 - protein, 18 aa, synthetic construct
  REGION 1..18: note = Description of Artificial Sequence: Synthetic peptide
  MOD_RES 2: note = Aib
  MOD_RES 16..17: note = Aib
  MOD_RES 18: note = Lys(C12)
  REGION 1..18: note = C-term amide
HXQGTFTSDYSKYLDXXK

SEQ ID NO: 268 - protein, 18 aa, synthetic construct
  REGION 1..18: note = Description of Artificial Sequence: Synthetic peptide
  MOD_RES 2: note = Aib
  MOD_RES 16..17: note = Aib
  MOD_RES 18: note = Lys(C14)
  REGION 1..18: note = C-term amide
HXQGTFTSDYSKYLDXXK

SEQ ID NO: 269 - protein, 18 aa, synthetic construct
  REGION 1..18: note = Description of Artificial Sequence: Synthetic peptide
  MOD_RES 2: note = Aib
  MOD_RES 16..17: note = Aib
  MOD_RES 18: note = Lys(C16)
  REGION 1..18: note = C-term amide
HXQGTFTSDYSKYLDXXK

SEQ ID NO: 270 - protein, 18 aa, synthetic construct
  REGION 1..18: note = Description of Artificial Sequence: Synthetic peptide
  MOD_RES 2: note = Aib
  MOD_RES 16..17: note = Aib
  MOD_RES 18: note = Lys(C18)
  REGION 1..18: note = C-term amide
HXQGTFTSDYSKYLDXXK

SEQ ID NO: 271 - protein, 18 aa, synthetic construct
  REGION 1..18: note = Description of Artificial Sequence: Synthetic peptide
  MOD_RES 2: note = Aib
  MOD_RES 16..17: note = Aib
  MOD_RES 18: note = Lys(C20)
  REGION 1..18: note = C-term amide
HXQGTFTSDYSKYLDXXK

SEQ ID NO: 272 - protein, 20 aa, synthetic construct
  REGION 1..20: note = Description of Artificial Sequence: Synthetic peptide
  MOD_RES 2: note = Aib
  MOD_RES 17: note = Aib
  MOD_RES 18: note = Lys(C12)
  MOD_RES 19..20: note = Aib
  REGION 1..20: note = C-term amide
HXQGTFTSDYSKYLDSXKXX

SEQ ID NO: 273 - protein, 20 aa, synthetic construct
  REGION 1..20: note = Description of Artificial Sequence: Synthetic peptide
  MOD_RES 2: note = Aib
  MOD_RES 17: note = Aib
  MOD_RES 18: note = Lys(C14)
  MOD_RES 19..20: note = Aib
  REGION 1..20: note = C-term amide
HXQGTFTSDYSKYLDSXKXX

SEQ ID NO: 274 - protein, 20 aa, synthetic construct
  REGION 1..20: note = Description of Artificial Sequence: Synthetic peptide
  MOD_RES 2: note = Aib
  MOD_RES 17: note = Aib
  MOD_RES 18: note = Lys(C16)
  MOD_RES 19..20: note = Aib
  REGION 1..20: note = C-term amide
HXQGTFTSDYSKYLDSXKXX

SEQ ID NO: 275 - protein, 20 aa, synthetic construct
  REGION 1..20: note = Description of Artificial Sequence: Synthetic peptide
  MOD_RES 2: note = Aib
  MOD_RES 17: note = Aib
  MOD_RES 18: note = Lys(C18)
  MOD_RES 19..20: note = Aib
  REGION 1..20: note = C-term amide
HXQGTFTSDYSKYLDSXKXX

SEQ ID NO: 276 - protein, 20 aa, synthetic construct
  REGION 1..20: note = Description of Artificial Sequence: Synthetic peptide
  MOD_RES 2: note = Aib
  MOD_RES 17: note = Aib
  MOD_RES 18: note = Lys(C20)
  MOD_RES 19..20: note = Aib
  REGION 1..20: note = C-term amide
HXQGTFTSDYSKYLDSXKXX

SEQ ID NO: 277 - protein, 20 aa, synthetic construct
  REGION 1..20: note = Description of Artificial Sequence: Synthetic peptide
  MOD_RES 2: note = Aib
  MOD_RES 17: note = Aib
  MOD_RES 18: note = Lys(C22)
  MOD_RES 19..20: note = Aib
  REGION 1..20: note = C-term amide
HXQGTFTSDYSKYLDSXKXX

SEQ ID NO: 278 - protein, 19 aa, synthetic construct
  REGION 1..19: note = Description of Artificial Sequence: Synthetic peptide
  MOD_RES 2: note = Aib
  MOD_RES 12: note = Lys is cyclized through side chain to form a lactam linkage
  REGION 16..19: note = misc_feature - Cyclic
  MOD_RES 16: note = Glu is cyclized through side chain to form a lactam linkage
  MOD_RES 18: note = Lys(C12)
  MOD_RES 19: note = Aib
  REGION 1..19: note = C-term amide
HXQGTFTSDYSKYLDERKX

SEQ ID NO: 279 - protein, 19 aa, synthetic construct
  REGION 1..19: note = Description of Artificial Sequence: Synthetic peptide
  MOD_RES 2: note = Aib
  MOD_RES 12: note = Lys is cyclized through side chain to form a lactam linkage
  REGION 16..19: note = misc_feature - Cyclic
  MOD_RES 16: note = Glu is cyclized through side chain to form a lactam linkage
  MOD_RES 18: note = Lys(C14)
  MOD_RES 19: note = Aib
  REGION 1..19: note = C-term amide
HXQGTFTSDYSKYLDERKX

SEQ ID NO: 280 - protein, 19 aa, synthetic construct
  REGION 1..19: note = Description of Artificial Sequence: Synthetic peptide
  MOD_RES 2: note = Aib
  MOD_RES 12: note = Lys is cyclized through side chain to form a lactam linkage
  REGION 16..19: note = misc_feature - Cyclic
  MOD_RES 16: note = Glu is cyclized through side chain to form a lactam linkage
  MOD_RES 18: note = Lys(C16)
  MOD_RES 19: note = Aib
  REGION 1..19: note = C-term amide
HXQGTFTSDYSKYLDERKX

SEQ ID NO: 281 - protein, 19 aa, synthetic construct
  REGION 1..19: note = Description of Artificial Sequence: Synthetic peptide
  MOD_RES 2: note = Aib
  MOD_RES 12: note = Lys is cyclized through side chain to form a lactam linkage
  REGION 16..19: note = misc_feature - Cyclic
  MOD_RES 16: note = Glu is cyclized through side chain to form a lactam linkage
  MOD_RES 18: note = Lys(C18)
  MOD_RES 19: note = Aib
  REGION 1..19: note = C-term amide
HXQGTFTSDYSKYLDERKX

SEQ ID NO: 282 - protein, 19 aa, synthetic construct
  REGION 1..19: note = Description of Artificial Sequence: Synthetic peptide
  MOD_RES 2: note = Aib
  MOD_RES 12: note = Lys is cyclized through side chain to form a lactam linkage
  REGION 16..19: note = misc_feature - Cyclic
  MOD_RES 16: note = Glu is cyclized through side chain to form a lactam linkage
  MOD_RES 18: note = Lys(C20)
  MOD_RES 19: note = Aib
  REGION 1..19: note = C-term amide
HXQGTFTSDYSKYLDERKX

SEQ ID NO: 283 - protein, 19 aa, synthetic construct
  REGION 1..19: note = Description of Artificial Sequence: Synthetic peptide
  MOD_RES 2: note = Aib
  MOD_RES 12: note = Lys is cyclized through side chain to form a lactam linkage
  REGION 16..19: note = misc_feature - Cyclic
  MOD_RES 16: note = Glu is cyclized through side chain to form a lactam linkage
  MOD_RES 18: note = Lys(C12)
  MOD_RES 19: note = Aib
  REGION 1..19: note = C-term amide
HXQGTFTSDYSKYLDEQKX

SEQ ID NO: 284 - protein, 19 aa, synthetic construct
  REGION 1..19: note = Description of Artificial Sequence: Synthetic peptide
  MOD_RES 2: note = Aib
  MOD_RES 12: note = Lys is cyclized through side chain to form a lactam linkage
  MOD_RES 16: note = Glu is cyclized through side chain to form a lactam linkage
  MOD_RES 18: note = Lys(C14)
  MOD_RES 19: note = Aib
  REGION 1..19: note = C-term amide
HXQGTFTSDYSKYLDEQKX

SEQ ID NO: 285 - protein, 19 aa, synthetic construct
  REGION 1..19: note = Description of Artificial Sequence: Synthetic peptide
  MOD_RES 2: note = Aib
  MOD_RES 12: note = Lys is cyclized through side chain to form a lactam linkage
  REGION 16..19: note = misc_feature - Cyclic
  MOD_RES 16: note = Glu is cyclized through side chain to form a lactam linkage
  MOD_RES 18: note = Lys(C16)
  MOD_RES 19: note = Aib
  REGION 1..19: note = C-term amide
HXQGTFTSDYSKYLDEQKX

SEQ ID NO: 286 - protein, 19 aa, synthetic construct
  REGION 1..19: note = Description of Artificial Sequence: Synthetic peptide
  MOD_RES 2: note = Aib
  MOD_RES 12: note = Lys is cyclized through side chain to form a lactam linkage
  REGION 16..19: note = misc_feature - Cyclic
  MOD_RES 16: note = Glu is cyclized through side chain to form a lactam linkage
  MOD_RES 18: note = Lys(C18)
  MOD_RES 19: note = Aib
  REGION 1..19: note = C-term amide
HXQGTFTSDYSKYLDEQKX

SEQ ID NO: 287 - protein, 19 aa, synthetic construct
  REGION 1..19: note = Description of Artificial Sequence: Synthetic peptide
  MOD_RES 2: note = Aib
  MOD_RES 12: note = Lys is cyclized through side chain to form a lactam linkage
  REGION 16..19: note = misc_feature - Cyclic
  MOD_RES 16: note = Glu is cyclized through side chain to form a lactam linkage
  MOD_RES 18: note = Lys(C20)
  MOD_RES 19: note = Aib
  REGION 1..19: note = C-term amide
HXQGTFTSDYSKYLDEQKX

SEQ ID NO: 288 - protein, 20 aa, synthetic construct
  REGION 1..20: note = Description of Artificial Sequence: Synthetic peptide
  MOD_RES 2: note = Aib
  REGION 12..16: note = misc_feature - Cyclic
  MOD_RES 12: note = Glu is cyclized through side chain to form a lactam linkage
  MOD_RES 16: note = Lys is cyclized through side chain to form a lactam linkage
  MOD_RES 18: note = Lys(C12)
  MOD_RES 19..20: note = Aib
  REGION 1..20: note = C-term amide
HXQGTFTSDYSEYLDKRKXX

SEQ ID NO: 289 - protein, 20 aa, synthetic construct
  REGION 1..20: note = Description of Artificial Sequence: Synthetic peptide
  MOD_RES 2: note = Aib
  REGION 12..16: note = misc_feature - Cyclic
  MOD_RES 12: note = Glu is cyclized through side chain to form a lactam linkage
  MOD_RES 16: note = Lys is cyclized through side chain to form a lactam linkage
  MOD_RES 18: note = Lys(C14)
  MOD_RES 19..20: note = Aib
  REGION 1..20: note = C-term amide
HXQGTFTSDYSEYLDKRKXX

SEQ ID NO: 290 - protein, 20 aa, synthetic construct
  REGION 1..20: note = Description of Artificial Sequence: Synthetic peptide
  MOD_RES 2: note = Aib
  REGION 12..16: note = misc_feature - Cyclic
  MOD_RES 12: note = Glu is cyclized through side chain to form a lactam linkage
  MOD_RES 16: note = Lys is cyclized through side chain to form a lactam linkage
  MOD_RES 18: note = Lys(C16)
  MOD_RES 19..20: note = Aib
  REGION 1..20: note = C-term amide
HXQGTFTSDYSEYLDKRKXX

SEQ ID NO: 291 - protein, 20 aa, synthetic construct
  REGION 1..20: note = Description of Artificial Sequence: Synthetic peptide
  MOD_RES 2: note = Aib
  REGION 12..16: note = misc_feature - Cyclic
  MOD_RES 12: note = Glu is cyclized through side chain to form a lactam linkage
  MOD_RES 16: note = Lys is cyclized through side chain to form a lactam linkage
  MOD_RES 18: note = Lys(C18)
  MOD_RES 19..20: note = Aib
  REGION 1..20: note = C-term amide
HXQGTFTSDYSEYLDKRKXX

SEQ ID NO: 292 - protein, 20 aa, synthetic construct
  REGION 1..20: note = Description of Artificial Sequence: Synthetic peptide
  MOD_RES 2: note = Aib
  REGION 12..16: note = misc_feature - Cyclic
  MOD_RES 12: note = Glu is cyclized through side chain to form a lactam linkage
  MOD_RES 16: note = Lys is cyclized through side chain to form a lactam linkage
  MOD_RES 18: note = Lys(C20)
  MOD_RES 19..20: note = Aib
  REGION 1..20: note = C-term amide
HXQGTFTSDYSEYLDKRKXX

SEQ ID NO: 293 - protein, 20 aa, synthetic construct
  REGION 1..20: note = Description of Artificial Sequence: Synthetic peptide
  MOD_RES 2: note = Aib
  REGION 12..16: note = misc_feature - Cyclic
  MOD_RES 12: note = Glu is cyclized through side chain to form a lactam linkage
  MOD_RES 16: note = Lys is cyclized through side chain to form a lactam linkage
  MOD_RES 17: note = hArg
  MOD_RES 18: note = Lys(C12)
  MOD_RES 19..20: note = Aib
  REGION 1..20: note = C-term amide
HXQGTFTSDYSEYLDKRKXX

SEQ ID NO: 294 - protein, 20 aa, synthetic construct
  REGION 1..20: note = Description of Artificial Sequence: Synthetic peptide
  MOD_RES 2: note = Aib
  REGION 12..16: note = misc_feature - Cyclic
  MOD_RES 12: note = Glu is cyclized through side chain to form a lactam linkage
  MOD_RES 16: note = Lys is cyclized through side chain to form a lactam linkage
  MOD_RES 17: note = hArg
  MOD_RES 18: note = Lys(C14)
  MOD_RES 19..20: note = Aib
  REGION 1..20: note = C-term amide
HXQGTFTSDYSEYLDKRKXX

SEQ ID NO: 295 - protein, 20 aa, synthetic construct
  REGION 1..20: note = Description of Artificial Sequence: Synthetic peptide
  MOD_RES 2: note = Aib
  REGION 12..16: note = misc_feature - Cyclic
  MOD_RES 12: note = Glu is cyclized through side chain to form a lactam linkage
  MOD_RES 16: note = Lys is cyclized through side chain to form a lactam linkage
  MOD_RES 17: note = hArg
  MOD_RES 18: note = Lys(C16)
  MOD_RES 19..20: note = Aib
  REGION 1..20: note = C-term amide
HXQGTFTSDYSEYLDKRKXX

SEQ ID NO: 296 - protein, 20 aa, synthetic construct
  REGION 1..20: note = Description of Artificial Sequence: Synthetic peptide
  MOD_RES 2: note = Aib
  REGION 12..16: note = misc_feature - Cyclic
  MOD_RES 12: note = Glu is cyclized through side chain to form a lactam linkage
  MOD_RES 16: note = Lys is cyclized through side chain to form a lactam linkage
  MOD_RES 17: note = hArg
  MOD_RES 18: note = Lys(C18)
  MOD_RES 19..20: note = Aib
  REGION 1..20: note = C-term amide
HXQGTFTSDYSEYLDKRKXX

SEQ ID NO: 297 - protein, 20 aa, synthetic construct
  REGION 1..20: note = Description of Artificial Sequence: Synthetic peptide
  MOD_RES 2: note = Aib
  REGION 12..16: note = misc_feature - Cyclic
  MOD_RES 12: note = Glu is cyclized through side chain to form a lactam linkage
  MOD_RES 16: note = Lys is cyclized through side chain to form a lactam linkage
  MOD_RES 17: note = hArg
  MOD_RES 18: note = Lys(C20)
  MOD_RES 19..20: note = Aib
  REGION 1..20: note = C-term amide
HXQGTFTSDYSEYLDKRKXX

SEQ ID NO: 298 - protein, 20 aa, synthetic construct
  REGION 1..20: note = Description of Artificial Sequence: Synthetic peptide
  MOD_RES 2: note = Ac4c
  MOD_RES 12: note = Lys is cyclized through side chain to form a lactam linkage
  REGION 16..20: note = misc_feature - Cyclic
  MOD_RES 16: note = Glu is cyclized through side chain to form a lactam linkage
  MOD_RES 18: note = Lys(C12)
  MOD_RES 19..20: note = Aib
  REGION 1..20: note = C-term amide
HXQGTFTSDYSKYLDERKXX

SEQ ID NO: 299 - protein, 20 aa, synthetic construct
  REGION 1..20: note = Description of Artificial Sequence: Synthetic peptide
  MOD_RES 2: note = Ac4c
  MOD_RES 12: note = Lys is cyclized through side chain to form a lactam linkage
  REGION 16..20: note = misc_feature - Cyclic
  MOD_RES 16: note = Glu is cyclized through side chain to form a lactam linkage
  MOD_RES 18: note = Lys(C14)
  MOD_RES 19..20: note = Aib
  REGION 1..20: note = C-term amide
HXQGTFTSDYSKYLDERKXX

SEQ ID NO: 300 - protein, 20 aa, synthetic construct
  REGION 1..20: note = Description of Artificial Sequence: Synthetic peptide
  MOD_RES 2: note = Ac4c
  MOD_RES 12: note = Lys is cyclized through side chain to form a lactam linkage
  REGION 16..20: note = misc_feature - Cyclic
  MOD_RES 16: note = Glu is cyclized through side chain to form a lactam linkage
  MOD_RES 18: note = Lys(C16)
  MOD_RES 19..20: note = Aib
  REGION 1..20: note = C-term amide
HXQGTFTSDYSKYLDERKXX

SEQ ID NO: 301 - protein, 20 aa, synthetic construct
  REGION 1..20: note = Description of Artificial Sequence: Synthetic peptide
  MOD_RES 2: note = Ac4c
  MOD_RES 12: note = Lys is cyclized through side chain to form a lactam linkage
  REGION 16..20: note = misc_feature - Cyclic
  MOD_RES 16: note = Glu is cyclized through side chain to form a lactam linkage
  MOD_RES 18: note = Lys(C18)
  MOD_RES 19..20: note = Aib
  REGION 1..20: note = C-term amide
HXQGTFTSDYSKYLDERKXX

SEQ ID NO: 302 - protein, 20 aa, synthetic construct
  REGION 1..20: note = Description of Artificial Sequence: Synthetic peptide
  MOD_RES 2: note = Ac4c
  MOD_RES 12: note = Lys is cyclized through side chain to form a lactam linkage
  REGION 16..20: note = misc_feature - Cyclic
  MOD_RES 16: note = Glu is cyclized through side chain to form a lactam linkage
  MOD_RES 18: note = Lys(C20)
  MOD_RES 19..20: note = Aib
  REGION 1..20: note = C-term amide
HXQGTFTSDYSKYLDERKXX

SEQ ID NO: 303 - protein, 20 aa, synthetic construct
  REGION 1..20: note = Description of Artificial Sequence: Synthetic peptide
  MOD_RES 2: note = Ac4c
  MOD_RES 12: note = Lys is cyclized through side chain to form a lactam linkage
  REGION 16..20: note = misc_feature - Cyclic
  MOD_RES 16: note = Glu is cyclized through side chain to form a lactam linkage
  MOD_RES 17: note = hArg
  MOD_RES 18: note = Lys(C12)
  MOD_RES 19..20: note = Aib
  REGION 1..20: note = C-term amide
HXQGTFTSDYSKYLDERKXX

SEQ ID NO: 304 - protein, 20 aa, synthetic construct
  REGION 1..20: note = Description of Artificial Sequence: Synthetic peptide
  MOD_RES 2: note = Ac4c
  MOD_RES 12: note = Lys is cyclized through side chain to form a lactam linkage
  REGION 16..20: note = misc_feature - Cyclic
  MOD_RES 16: note = Glu is cyclized through side chain to form a lactam linkage
  MOD_RES 17: note = hArg
  MOD_RES 18: note = Lys(C14)
  MOD_RES 19..20: note = Aib
  REGION 1..20: note = C-term amide
HXQGTFTSDYSKYLDERKXX

SEQ ID NO: 305 - protein, 20 aa, synthetic construct
  REGION 1..20: note = Description of Artificial Sequence: Synthetic peptide
  MOD_RES 2: note = Ac4c
  MOD_RES 12: note = Lys is cyclized through side chain to form a lactam linkage
  REGION 16..20: note = misc_feature - Cyclic
  MOD_RES 16: note = Glu is cyclized through side chain to form a lactam linkage
  MOD_RES 17: note = hArg
  MOD_RES 18: note = Lys(C16)
  MOD_RES 19..20: note = Aib
  REGION 1..20: note = C-term amide
HXQGTFTSDYSKYLDERKXX

SEQ ID NO: 306 - protein, 20 aa, synthetic construct
  REGION 1..20: note = Description of Artificial Sequence: Synthetic peptide
  MOD_RES 2: note = Ac4c
  MOD_RES 12: note = Lys is cyclized through side chain to form a lactam linkage
  REGION 16..20: note = misc_feature - Cyclic
  MOD_RES 16: note = Glu is cyclized through side chain to form a lactam linkage
  MOD_RES 17: note = hArg
  MOD_RES 18: note = Lys(C18)
  MOD_RES 19..20: note = Aib
  REGION 1..20: note = C-term amide
HXQGTFTSDYSKYLDERKXX

SEQ ID NO: 307 - protein, 20 aa, synthetic construct
  REGION 1..20: note = Description of Artificial Sequence: Synthetic peptide
  MOD_RES 2: note = Ac4c
  MOD_RES 12: note = Lys is cyclized through side chain to form a lactam linkage
  REGION 16..20: note = misc_feature - Cyclic
  MOD_RES 16: note = Glu is cyclized through side chain to form a lactam linkage
  MOD_RES 17: note = hArg
  MOD_RES 18: note = Lys(C20)
  MOD_RES 19..20: note = Aib
  REGION 1..20: note = C-term amide
HXQGTFTSDYSKYLDERKXX

SEQ ID NO: 308 - protein, 20 aa, synthetic construct
  REGION 1..20: note = Description of Artificial Sequence: Synthetic peptide
  MOD_RES 2: note = Ac4c
  REGION 12..16: note = misc_feature - Cyclic
  MOD_RES 12: note = Glu is cyclized through side chain to form a lactam linkage
  MOD_RES 16: note = Lys is cyclized through side chain to form a lactam linkage
  MOD_RES 18: note = Lys(C12)
  MOD_RES 19..20: note = Aib
  REGION 1..20: note = C-term amide
HXQGTFTSDYSEYLDKRKXX

SEQ ID NO: 309 - protein, 20 aa, synthetic construct
  REGION 1..20: note = Description of Artificial Sequence: Synthetic peptide
  MOD_RES 2: note = Ac4c
  REGION 12..16: note = misc_feature - Cyclic
  MOD_RES 12: note = Glu is cyclized through side chain to form a lactam linkage
  MOD_RES 16: note = Lys is cyclized through side chain to form a lactam linkage
  MOD_RES 18: note = Lys(C14)
  MOD_RES 19..20: note = Aib
  REGION 1..20: note = C-term amide
HXQGTFTSDYSEYLDKRKXX

SEQ ID NO: 310 - protein, 20 aa, synthetic construct
  REGION 1..20: note = Description of Artificial Sequence: Synthetic peptide
  MOD_RES 2: note = Ac4c
  REGION 12..16: note = misc_feature - Cyclic
  MOD_RES 12: note = Glu is cyclized through side chain to form a lactam linkage
  MOD_RES 16: note = Lys is cyclized through side chain to form a lactam linkage
  MOD_RES 18: note = Lys(C16)
  MOD_RES 19..20: note = Aib
  REGION 1..20: note = C-term amide
HXQGTFTSDYSEYLDKRKXX

SEQ ID NO: 311 - protein, 20 aa, synthetic construct
  REGION 1..20: note = Description of Artificial Sequence: Synthetic peptide
  MOD_RES 2: note = Ac4c
  REGION 12..16: note = misc_feature - Cyclic
  MOD_RES 12: note = Glu is cyclized through side chain to form a lactam linkage
  MOD_RES 16: note = Lys is cyclized through side chain to form a lactam linkage
  MOD_RES 18: note = Lys(C18)
  MOD_RES 19..20: note = Aib
  REGION 1..20: note = C-term amide
HXQGTFTSDYSEYLDKRKXX

SEQ ID NO: 312 - protein, 20 aa, synthetic construct
  REGION 1..20: note = Description of Artificial Sequence: Synthetic peptide
  MOD_RES 2: note = Ac4c
  REGION 12..16: note = misc_feature - Cyclic
  MOD_RES 12: note = Glu is cyclized through side chain to form a lactam linkage
  MOD_RES 16: note = Lys is cyclized through side chain to form a lactam linkage
  MOD_RES 18: note = Lys(C20)
  MOD_RES 19..20: note = Aib
  REGION 1..20: note = C-term amide
HXQGTFTSDYSEYLDKRKXX

SEQ ID NO: 313 - protein, 20 aa, synthetic construct
  REGION 1..20: note = Description of Artificial Sequence: Synthetic peptide
  MOD_RES 2: note = Ac4c
  REGION 12..16: note = misc_feature - Cyclic
  MOD_RES 12: note = Glu is cyclized through side chain to form a lactam linkage
  MOD_RES 16: note = Lys is cyclized through side chain to form a lactam linkage
  MOD_RES 17: note = hArg
  MOD_RES 18: note = Lys(C12)
  MOD_RES 19..20: note = Aib
  REGION 1..20: note = C-term amide
HXQGTFTSDYSEYLDKRKXX

SEQ ID NO: 314 - protein, 20 aa, synthetic construct
  REGION 1..20: note = Description of Artificial Sequence: Synthetic peptide
  MOD_RES 2: note = Ac4c
  REGION 12..16: note = misc_feature - Cyclic
  MOD_RES 12: note = Glu is cyclized through side chain to form a lactam linkage
  MOD_RES 16: note = Lys is cyclized through side chain to form a lactam linkage
  MOD_RES 17: note = hArg
  MOD_RES 18: note = Lys(C14)
  MOD_RES 19..20: note = Aib
  REGION 1..20: note = C-term amide
HXQGTFTSDYSEYLDKRKXX

SEQ ID NO: 315 - protein, 20 aa, synthetic construct
  REGION 1..20: note = Description of Artificial Sequence: Synthetic peptide
  MOD_RES 2: note = Ac4c
  REGION 12..16: note = misc_feature - Cyclic
  MOD_RES 12: note = Glu is cyclized through side chain to form a lactam linkage
  MOD_RES 16: note = Lys is cyclized through side chain to form a lactam linkage
  MOD_RES 17: note = hArg
  MOD_RES 18: note = Lys(C16)
  MOD_RES 19..20: note = Aib
  REGION 1..20: note = C-term amide
HXQGTFTSDYSEYLDKRKXX

SEQ ID NO: 316 - protein, 20 aa, synthetic construct
  REGION 1..20: note = Description of Artificial Sequence: Synthetic peptide
  MOD_RES 2: note = Ac4c
  REGION 12..16: note = misc_feature - Cyclic
  MOD_RES 12: note = Glu is cyclized through side chain to form a lactam linkage
  MOD_RES 16: note = Lys is cyclized through side chain to form a lactam linkage
  MOD_RES 17: note = hArg
  MOD_RES 18: note = Lys(C18)
  MOD_RES 19..20: note = Aib
  REGION 1..20: note = C-term amide
HXQGTFTSDYSEYLDKRKXX

SEQ ID NO: 317 - protein, 20 aa, synthetic construct
  REGION 1..20: note = Description of Artificial Sequence: Synthetic peptide
  MOD_RES 2: note = Ac4c
  REGION 12..16: note = misc_feature - Cyclic
  MOD_RES 12: note = Glu is cyclized through side chain to form a lactam linkage
  MOD_RES 16: note = Lys is cyclized through side chain to form a lactam linkage
  MOD_RES 17: note = hArg
  MOD_RES 18: note = Lys(C20)
  MOD_RES 19..20: note = Aib
  REGION 1..20: note = C-term amide
HXQGTFTSDYSEYLDKRKXX

SEQ ID NO: 318 - protein, 20 aa, synthetic construct
  REGION 1..20: note = Description of Artificial Sequence: Synthetic peptide
  MOD_RES 2: note = Aib
  MOD_RES 16: note = Aib
  MOD_RES 18: note = Lys(C12)
  MOD_RES 19: note = Aib
  MOD_RES 20: note = Aib
  REGION 1..20: note = C-term amide
HXQGTFTSDYSKYLDXRKXX

SEQ ID NO: 319 - protein, 20 aa, synthetic construct
  REGION 1..20: note = Description of Artificial Sequence: Synthetic peptide
  MOD_RES 2: note = Aib
  MOD_RES 16: note = Aib
  MOD_RES 18: note = Lys(C14)
  MOD_RES 19: note = Aib
  MOD_RES 20: note = Aib
  REGION 1..20: note = C-term amide
HXQGTFTSDYSKYLDXRKXX

SEQ ID NO: 320 - protein, 20 aa, synthetic construct
  REGION 1..20: note = Description of Artificial Sequence: Synthetic peptide
  MOD_RES 2: note = Aib
  MOD_RES 16: note = Aib
  MOD_RES 18: note = Lys(C16)
  MOD_RES 19: note = Aib
  MOD_RES 20: note = Aib
  REGION 1..20: note = C-term amide
HXQGTFTSDYSKYLDXRKXX

SEQ ID NO: 321 - protein, 20 aa, synthetic construct
  REGION 1..20: note = Description of Artificial Sequence: Synthetic peptide
  MOD_RES 2: note = Aib
  MOD_RES 16: note = Aib
  MOD_RES 18: note = Lys(C18)
  MOD_RES 19: note = Aib
  MOD_RES 20: note = Aib
  REGION 1..20: note = C-term amide
HXQGTFTSDYSKYLDXRKXX

SEQ ID NO: 322 - protein, 20 aa, synthetic construct
  REGION 1..20: note = Description of Artificial Sequence: Synthetic peptide
  MOD_RES 2: note = Aib
  MOD_RES 16: note = Aib
  MOD_RES 18: note = Lys(C20)
  MOD_RES 19: note = Aib
  MOD_RES 20: note = Aib
  REGION 1..20: note = C-term amide
HXQGTFTSDYSKYLDXRKXX

SEQ ID NO: 323 - protein, 20 aa, synthetic construct
  REGION 1..20: note = Description of Artificial Sequence: Synthetic peptide
  MOD_RES 2: note = Aib
  MOD_RES 16: note = Aib
  MOD_RES 17: note = hArg
  MOD_RES 18: note = Lys(C12)
  MOD_RES 19: note = Aib
  MOD_RES 20: note = Aib
  REGION 1..20: note = C-term amide
HXQGTFTSDYSKYLDXRKXX

SEQ ID NO: 324 - protein, 20 aa, synthetic construct
  REGION 1..20: note = Description of Artificial Sequence: Synthetic peptide
  MOD_RES 2: note = Aib
  MOD_RES 16: note = Aib
  MOD_RES 17: note = hArg
  MOD_RES 18: note = Lys(C14)
  MOD_RES 19: note = Aib
  MOD_RES 20: note = Aib
  REGION 1..20: note = C-term amide
HXQGTFTSDYSKYLDXRKXX

SEQ ID NO: 325 - protein, 20 aa, synthetic construct
  REGION 1..20: note = Description of Artificial Sequence: Synthetic peptide
  MOD_RES 2: note = Aib
  MOD_RES 16: note = Aib
  MOD_RES 17: note = hArg
  MOD_RES 18: note = Lys(C16)
  MOD_RES 19: note = Aib
  MOD_RES 20: note = Aib
  REGION 1..20: note = C-term amide
HXQGTFTSDYSKYLDXRKXX

SEQ ID NO: 326 - protein, 20 aa, synthetic construct
  REGION 1..20: note = Description of Artificial Sequence: Synthetic peptide
  MOD_RES 2: note = Aib
  MOD_RES 16: note = Aib
  MOD_RES 17: note = hArg
  MOD_RES 18: note = Lys(C18)
  MOD_RES 19: note = Aib
  MOD_RES 20: note = Aib
  REGION 1..20: note = C-term amide
HXQGTFTSDYSKYLDXRKXX

SEQ ID NO: 327 - protein, 20 aa, synthetic construct
  REGION 1..20: note = Description of Artificial Sequence: Synthetic peptide
  MOD_RES 2: note = Aib
  MOD_RES 16: note = Aib
  MOD_RES 17: note = hArg
  MOD_RES 18: note = Lys(C20)
  MOD_RES 19: note = Aib
  MOD_RES 20: note = Aib
  REGION 1..20: note = C-term amide
HXQGTFTSDYSKYLDXRKXX

SEQ ID NO: 328 - protein, 19 aa, synthetic construct
  REGION 1..19: note = Description of Artificial Sequence: Synthetic peptide
  MOD_RES 2: note = Aib
  MOD_RES 16: note = Aib
  MOD_RES 18: note = Lys(C12)
  MOD_RES 19: note = Aib
  REGION 1..19: note = C-term amide
HXQGTFTSDYSKYLDXRKX

SEQ ID NO: 329 - protein, 19 aa, synthetic construct
  REGION 1..19: note = Description of Artificial Sequence: Synthetic peptide
  MOD_RES 2: note = Aib
  MOD_RES 16: note = Aib
  MOD_RES 18: note = Lys(C14)
  MOD_RES 19: note = Aib
  REGION 1..19: note = C-term amide
HXQGTFTSDYSKYLDXRKX

SEQ ID NO: 330 - protein, 19 aa, synthetic construct
  REGION 1..19: note = Description of Artificial Sequence: Synthetic peptide
  MOD_RES 2: note = Aib
  MOD_RES 16: note = Aib
  MOD_RES 18: note = Lys(C16)
  MOD_RES 19: note = Aib
  REGION 1..19: note = C-term amide
HXQGTFTSDYSKYLDXRKX

SEQ ID NO: 331 - protein, 19 aa, synthetic construct
  REGION 1..19: note = Description of Artificial Sequence: Synthetic peptide
  MOD_RES 2: note = Aib
  MOD_RES 16: note = Aib
  MOD_RES 18: note = Lys(C18)
  MOD_RES 19: note = Aib
  REGION 1..19: note = C-term amide
HXQGTFTSDYSKYLDXRKX

SEQ ID NO: 332 - protein, 19 aa, synthetic construct
  REGION 1..19: note = Description of Artificial Sequence: Synthetic peptide
  MOD_RES 2: note = Aib
  MOD_RES 16: note = Aib
  MOD_RES 18: note = Lys(C20)
  MOD_RES 19: note = Aib
  REGION 1..19: note = C-term amide
HXQGTFTSDYSKYLDXRKX

SEQ ID NO: 333 - protein, 19 aa, synthetic construct
  REGION 1..19: note = Description of Artificial Sequence: Synthetic peptide
  MOD_RES 2: note = Aib
  MOD_RES 16: note = Aib
  MOD_RES 17: note = hArg
  MOD_RES 18: note = Lys(C12)
  MOD_RES 19: note = Aib
  REGION 1..19: note = C-term amide
HXQGTFTSDYSKYLDXRKX

SEQ ID NO: 334 - protein, 19 aa, synthetic construct
  REGION 1..19: note = Description of Artificial Sequence: Synthetic peptide
  MOD_RES 2: note = Aib
  MOD_RES 16: note = Aib
  MOD_RES 17: note = hArg
  MOD_RES 18: note = Lys(C14)
  MOD_RES 19: note = Aib
  REGION 1..19: note = C-term amide
HXQGTFTSDYSKYLDXRKX

SEQ ID NO: 335 - protein, 19 aa, synthetic construct
  REGION 1..19: note = Description of Artificial Sequence: Synthetic peptide
  MOD_RES 2: note = Aib
  MOD_RES 16: note = Aib
  MOD_RES 17: note = hArg
  MOD_RES 18: note = Lys(C16)
  MOD_RES 19: note = Aib
  REGION 1..19: note = C-term amide
HXQGTFTSDYSKYLDXRKX

SEQ ID NO: 336 - protein, 19 aa, synthetic construct
  REGION 1..19: note = Description of Artificial Sequence: Synthetic peptide
  MOD_RES 2: note = Aib
  MOD_RES 16: note = Aib
  MOD_RES 17: note = hArg
  MOD_RES 18: note = Lys(C18)
  MOD_RES 19: note = Aib
  REGION 1..19: note = C-term amide
HXQGTFTSDYSKYLDXRKX

SEQ ID NO: 337 - protein, 19 aa, synthetic construct
  REGION 1..19: note = Description of Artificial Sequence: Synthetic peptide
  MOD_RES 2: note = Aib
  MOD_RES 16: note = Aib
  MOD_RES 17: note = hArg
  MOD_RES 18: note = Lys(C20)
  MOD_RES 19: note = Aib
  REGION 1..19: note = C-term amide
HXQGTFTSDYSKYLDXRKX

SEQ ID NO: 338 - protein, 19 aa, synthetic construct
  REGION 1..19: note = Description of Artificial Sequence: Synthetic peptide
  MOD_RES 2: note = Ac3c
  MOD_RES 16: note = Aib
  MOD_RES 17: note = hArg
  MOD_RES 18: note = Lys(C12)
  MOD_RES 19: note = Aib
  REGION 1..19: note = C-term amide
HXQGTFTSDYSKYLDXRKX

SEQ ID NO: 339 - protein, 18 aa, synthetic construct
  REGION 1..18: note = Description of Artificial Sequence: Synthetic peptide
  MOD_RES 2: note = Aib
  MOD_RES 18: note = Lys(C12)
  REGION 1..18: note = C-term amide
HXQGTFTSDYSKYLDSRK

SEQ ID NO: 340 - protein, 18 aa, synthetic construct
  REGION 1..18: note = Description of Artificial Sequence: Synthetic peptide
  MOD_RES 2: note = Aib
  MOD_RES 17: note = hArg
  MOD_RES 18: note = Lys(C12)
  REGION 1..18: note = C-term amide
HXQGTFTSDYSKYLDSRK

SEQ ID NO: 341 - protein, 18 aa, synthetic construct
  REGION 1..18: note = Description of Artificial Sequence: Synthetic peptide
  MOD_RES 2: note = Aib
  MOD_RES 16: note = Aib
  MOD_RES 18: note = Lys(C12)
  REGION 1..18: note = C-term amide
HXQGTFTSDYSKYLDXRK

SEQ ID NO: 342 - protein, 18 aa, synthetic construct
  REGION 1..18: note = Description of Artificial Sequence: Synthetic peptide
  MOD_RES 2: note = Aib
  MOD_RES 16: note = Aib
  MOD_RES 17: note = hArg
  MOD_RES 18: note = Lys(C12)
  REGION 1..18: note = C-term amide
HXQGTFTSDYSKYLDXRK

SEQ ID NO: 343 - protein, 18 aa, synthetic construct
  REGION 1..18: note = Description of Artificial Sequence: Synthetic peptide
  MOD_RES 2: note = Ac4c
  MOD_RES 16: note = Aib
  MOD_RES 18: note = Lys(C12)
  REGION 1..18: note = C-term amide
HXQGTFTSDYSKYLDXRK

SEQ ID NO: 344 - protein, 19 aa, synthetic construct
  REGION 1..19: note = Description of Artificial Sequence: Synthetic peptide
  MOD_RES 2: note = Ac4c
  MOD_RES 16: note = Aib
  MOD_RES 18: note = Lys(C12)
  MOD_RES 19: note = Aib
  REGION 1..19: note = C-term amide
HXQGTFTSDYSKYLDXRKX

SEQ ID NO: 345 - protein, 18 aa, synthetic construct
  REGION 1..18: note = Description of Artificial Sequence: Synthetic peptide
  MOD_RES 2: note = Ac4c
  MOD_RES 16: note = Aib
  MOD_RES 17: note = hArg
  MOD_RES 18: note = Lys(C12)
  REGION 1..18: note = C-term amide
HXQGTFTSDYSKYLDXRK

SEQ ID NO: 346 - protein, 18 aa, synthetic construct
  REGION 1..18: note = Description of Artificial Sequence: Synthetic peptide
  MOD_RES 2: note = Ac4c
  MOD_RES 16: note = Aib
  MOD_RES 17: note = hArg
  MOD_RES 18: note = Lys(C14)
  REGION 1..18: note = C-term amide
HXQGTFTSDYSKYLDXRK

SEQ ID NO: 347 - protein, 18 aa, synthetic construct
  REGION 1..18: note = Description of Artificial Sequence: Synthetic peptide
  MOD_RES 2: note = Ac4c
  MOD_RES 16: note = Aib
  MOD_RES 17: note = hArg
  MOD_RES 18: note = Lys(C16)
  REGION 1..18: note = C-term amide
HXQGTFTSDYSKYLDXRK

SEQ ID NO: 348 - protein, 18 aa, synthetic construct
  REGION 1..18: note = Description of Artificial Sequence: Synthetic peptide
  MOD_RES 2: note = Ac4c
  MOD_RES 16: note = Aib
  MOD_RES 17: note = hArg
  MOD_RES 18: note = Lys(C18)
  REGION 1..18: note = C-term amide
HXQGTFTSDYSKYLDXRK

SEQ ID NO: 349 - protein, 18 aa, synthetic construct
  REGION 1..18: note = Description of Artificial Sequence: Synthetic peptide
  MOD_RES 2: note = Aib
  REGION 10..14: note = misc_feature - Cyclic
  MOD_RES 10: note = Glu is cyclized through side chain to form a lactam linkage
  MOD_RES 14: note = Lys is cyclized through side chain to form a lactam linkage
  MOD_RES 18: note = Lys(C12)
  REGION 1..18: note = C-term amide
HXQGTFTSDESKYKDSRK

SEQ ID NO: 350 - protein, 18 aa, synthetic construct
  REGION 1..18: note = Description of Artificial Sequence: Synthetic peptide
  MOD_RES 2: note = Ac4c
  REGION 10..14: note = misc_feature - Cyclic
  MOD_RES 10: note = Glu is cyclized through side chain to form a lactam linkage
  MOD_RES 14: note = Lys is cyclized through side chain to form a lactam linkage
  MOD_RES 16: note = Aib
  MOD_RES 17: note = hArg
  MOD_RES 18: note = Lys(C14)
  REGION 1..18: note = C-term amide
HXQGTFTSDESKYKDXRK

SEQ ID NO: 351 - protein, 18 aa, synthetic construct
  REGION 1..18: note = Description of Artificial Sequence: Synthetic peptide
  MOD_RES 2: note = Aib
  REGION 13..17: note = misc_feature - Cyclic
  MOD_RES 13: note = Glu is cyclized through side chain to form a lactam linkage
  MOD_RES 17: note = Lys is cyclized through side chain to form a lactam linkage
  MOD_RES 18: note = Lys(C12)
  REGION 1..18: note = C-term amide
HXQGTFTSDYSKELDSKK

SEQ ID NO: 352 - protein, 20 aa, synthetic construct
  REGION 1..20: note = Description of Artificial Sequence: Synthetic peptide
  MOD_RES 2: note = Aib
  REGION 17..20: note = misc_feature - Cyclic
  MOD_RES 17: note = Glu is cyclized through side chain to form a lactam linkage
  MOD_RES 18: note = Lys(C12)
  MOD_RES 20: note = Lys is cyclized through side chain to form a lactam linkage
  REGION 1..20: note = C-term amide
HXQGTFTSDYSKYLDSEKAK

SEQ ID NO: 353 - protein, 21 aa, synthetic construct
  REGION 1..21: note = Description of Artificial Sequence: Synthetic peptide
  MOD_RES 2: note = Aib
  REGION 17..21: note = misc_feature - Cyclic
  MOD_RES 17: note = Glu is cyclized through side chain to form a lactam linkage
  MOD_RES 18: note = Lys(C12)
  MOD_RES 21: note = Lys is cyclized through side chain to form a lactam linkage
  REGION 1..21: note = C-term amide
HXQGTFTSDYSKYLDSEKARK

SEQ ID NO: 354 - protein, 21 aa, synthetic construct
  REGION 1..21: note = Description of Artificial Sequence: Synthetic peptide
  MOD_RES 2: note = Aib
  REGION 17..21: note = misc_feature - Cyclic
  MOD_RES 17: note = Glu is cyclized through side chain to form a lactam linkage
  MOD_RES 18: note = Lys(C14)
  MOD_RES 21: note = Lys is cyclized through side chain to form a lactam linkage
  REGION 1..21: note = C-term amide
HXQGTFTSDYSKYLDSEKARK

SEQ ID NO: 355 - protein, 21 aa, synthetic construct
  REGION 1..21: note = Description of Artificial Sequence: Synthetic peptide
  MOD_RES 2: note = Aib
  REGION 17..21: note = misc_feature - Cyclic
  MOD_RES 17: note = Glu is cyclized through side chain to form a lactam linkage
  MOD_RES 18: note = Lys(C16)
  MOD_RES 21: note = Lys is cyclized through side chain to form a lactam linkage
  REGION 1..21: note = C-term amide
HXQGTFTSDYSKYLDSEKARK

SEQ ID NO: 356 - protein, 21 aa, synthetic construct
  REGION 1..21: note = Description of Artificial Sequence: Synthetic peptide
  MOD_RES 2: note = Aib
  REGION 17..21: note = misc_feature - Cyclic
  MOD_RES 17: note = Glu is cyclized through side chain to form a lactam linkage
  MOD_RES 18: note = Lys(C18)
  MOD_RES 21: note = Lys is cyclized through side chain to form a lactam linkage
  REGION 1..21: note = C-term amide
HXQGTFTSDYSKYLDSEKARK

SEQ ID NO: 357 - protein, 21 aa, synthetic construct
  REGION 1..21: note = Description of Artificial Sequence: Synthetic peptide
  MOD_RES 2: note = Aib
  REGION 17..21: note = misc_feature - Cyclic
  MOD_RES 17: note = Glu is cyclized through side chain to form a lactam linkage
  MOD_RES 18: note = Lys(C20)
  MOD_RES 21: note = Lys is cyclized through side chain to form a lactam linkage
  REGION 1..21: note = C-term amide
HXQGTFTSDYSKYLDSEKARK

SEQ ID NO: 358 - protein, 21 aa, synthetic construct
  REGION 1..21: note = Description of Artificial Sequence: Synthetic peptide
  MOD_RES 2: note = Aib
  REGION 17..21: note = misc_feature - Cyclic
  MOD_RES 17: note = Glu is cyclized through side chain to form a lactam linkage
  MOD_RES 18: note = Lys(C12)
  MOD_RES 21: note = Lys is cyclized through side chain to form a lactam linkage
  REGION 1..21: note = C-term amide
HXQGTFTSDYSKYLDSEKAQK

SEQ ID NO: 359 - protein, 21 aa, synthetic construct
  REGION 1..21: note = Description of Artificial Sequence: Synthetic peptide
  MOD_RES 2: note = Aib
  REGION 17..21: note = misc_feature - Cyclic
  MOD_RES 17: note = Glu is cyclized through side chain to form a lactam linkage
  MOD_RES 18: note = Lys(C14)
  MOD_RES 21: note = Lys is cyclized through side chain to form a lactam linkage
  REGION 1..21: note = C-term amide
HXQGTFTSDYSKYLDSEKAQK

SEQ ID NO: 360 - protein, 21 aa, synthetic construct
  REGION 1..21: note = Description of Artificial Sequence: Synthetic peptide
  MOD_RES 2: note = Aib
  REGION 17..21: note = misc_feature - Cyclic
  MOD_RES 17: note = Glu is cyclized through side chain to form a lactam linkage
  MOD_RES 18: note = Lys(C16)
  MOD_RES 21: note = Lys is cyclized through side chain to form a lactam linkage
  REGION 1..21: note = C-term amide
HXQGTFTSDYSKYLDSEKAQK

SEQ ID NO: 361 - protein, 21 aa, synthetic construct
  REGION 1..21: note = Description of Artificial Sequence: Synthetic peptide
  MOD_RES 2: note = Aib
  REGION 17..21: note = misc_feature - Cyclic
  MOD_RES 17: note = Glu is cyclized through side chain to form a lactam linkage
  MOD_RES 18: note = Lys(C18)
  MOD_RES 21: note = Lys is cyclized through side chain to form a lactam linkage
  REGION 1..21: note = C-term amide
HXQGTFTSDYSKYLDSEKAQK

SEQ ID NO: 362 - protein, 21 aa, synthetic construct
  REGION 1..21: note = Description of Artificial Sequence: Synthetic peptide
  MOD_RES 2: note = Aib
  REGION 17..21: note = misc_feature - Cyclic
  MOD_RES 17: note = Glu is cyclized through side chain to form a lactam linkage
  MOD_RES 18: note = Lys(C20)
  MOD_RES 21: note = Lys is cyclized through side chain to form a lactam linkage
  REGION 1..21: note = C-term amide
HXQGTFTSDYSKYLDSEKAQK

SEQ ID NO: 363 - protein, 21 aa, synthetic construct
  REGION 1..21: note = Description of Artificial Sequence: Synthetic peptide
  MOD_RES 2: note = Aib
  REGION 17..21: note = misc_feature - Cyclic
  MOD_RES 17: note = Glu is cyclized through side chain to form a lactam linkage
  MOD_RES 18: note = Lys(C12)
  MOD_RES 21: note = Lys is cyclized through side chain to form a lactam linkage
  REGION 1..21: note = C-term amide
HXQGTFTSDYSKYLDSEKVRK

SEQ ID NO: 364 - protein, 11 aa, synthetic construct
  REGION 1..11: note = Description of Artificial Sequence: Synthetic peptide
  MOD_RES 2: note = Aib
  MOD_RES 6: note = Alpha-MeF
  MOD_RES 11: note = Lys(C8)
  REGION 1..11: note = C-term amide
HXQGTFTSDYK

SEQ ID NO: 365 - protein, 11 aa, synthetic construct
  REGION 1..11: note = Description of Artificial Sequence: Synthetic peptide
  MOD_RES 2: note = Aib
  MOD_RES 6: note = Alpha-MeF
  MOD_RES 11: note = Lys(C14)
  REGION 1..11: note = C-term amide
HXQGTFTSDYK

SEQ ID NO: 366 - protein, 11 aa, synthetic construct
  REGION 1..11: note = Description of Artificial Sequence: Synthetic peptide
  MOD_RES 2: note = Aib
  MOD_RES 6: note = Alpha-MeF
  MOD_RES 11: note = Lys(C16)
  REGION 1..11: note = C-term amide
HXQGTFTSDYK

SEQ ID NO: 367 - protein, 11 aa, synthetic construct
  REGION 1..11: note = Description of Artificial Sequence: Synthetic peptide
  MOD_RES 2: note = Aib
  MOD_RES 6: note = Alpha-MeF
  MOD_RES 11: note = Lys(C20)
  REGION 1..11: note = C-term amide
HXQGTFTSDYK

SEQ ID NO: 368 - protein, 11 aa, synthetic construct
  REGION 1..11: note = Description of Artificial Sequence: Synthetic peptide
  MOD_RES 2: note = Aib
  MOD_RES 11: note = Lys(C12)
  REGION 1..11: note = C-term amide
HXQGTFTSDYK

SEQ ID NO: 369 - protein, 11 aa, synthetic construct
  REGION 1..11: note = Description of Artificial Sequence: Synthetic peptide
  MOD_RES 2: note = Aib
  MOD_RES 6: note = Alpha-MeF
  MOD_RES 11: note = Lys(C12)
  REGION 1..11: note = C-term amide
HXQGTFTSDYK

SEQ ID NO: 370 - protein, 11 aa, synthetic construct
  REGION 1..11: note = Description of Artificial Sequence: Synthetic peptide
  MOD_RES 2: note = Aib
  MOD_RES 6: note = Alpha-MeF
  MOD_RES 11: note = Lys(C18)
  REGION 1..11: note = C-term amide
HXQGTFTSDYK

SEQ ID NO: 371 - protein, 11 aa, synthetic construct
  REGION 1..11: note = Description of Artificial Sequence: Synthetic peptide
  MOD_RES 2: note = Alpha-MePro
  MOD_RES 11: note = Lys(C12)
  REGION 1..11: note = C-term amide
HPQGTFTSDYK

SEQ ID NO: 372 - protein, 11 aa, synthetic construct
  REGION 1..11: note = Description of Artificial Sequence: Synthetic peptide
  MOD_RES 2: note = Alpha-MePro
  MOD_RES 6: note = Alpha-MeF
  MOD_RES 11: note = Lys(C12)
  REGION 1..11: note = C-term amide
HPQGTFTSDYK

SEQ ID NO: 373 - protein, 11 aa, synthetic construct
  REGION 1..11: note = Description of Artificial Sequence: Synthetic peptide
  MOD_RES 2: note = Alpha-MePro
  MOD_RES 6: note = Alpha-MeF
  MOD_RES 10: note = Bip
  MOD_RES 11: note = Lys(C12)
  REGION 1..11: note = C-term amide
HPQGTFTSDXK

SEQ ID NO: 374 - protein, 11 aa, synthetic construct
  REGION 1..11: note = Description of Artificial Sequence: Synthetic peptide
  MOD_RES 2: note = Aib
  MOD_RES 10: note = Bip
  MOD_RES 11: note = Lys(C12)
  REGION 1..11: note = C-term amide
HXQGTFTSDXK

SEQ ID NO: 375 - protein, 11 aa, synthetic construct
  REGION 1..11: note = Description of Artificial Sequence: Synthetic peptide
  MOD_RES 2: note = Aib
  MOD_RES 6: note = Alpha-MeF
  MOD_RES 10: note = Bip
  MOD_RES 11: note = Lys(C18)
  REGION 1..11: note = C-term amide
HXQGTFTSDXK

SEQ ID NO: 376 - protein, 11 aa, synthetic construct
  REGION 1..11: note = Description of Artificial Sequence: Synthetic peptide
  MOD_RES 2: note = Alpha-MePro
  MOD_RES 6: note = Alpha-MeF
  MOD_RES 11: note = Lys(C8)
  REGION 1..11: note = C-term amide
HPQGTFTSDYK

SEQ ID NO: 377 - protein, 11 aa, synthetic construct
  REGION 1..11: note = Description of Artificial Sequence: Synthetic peptide
  MOD_RES 2: note = Alpha-MePro
  MOD_RES 6: note = Alpha-MeF
  MOD_RES 11: note = Lys(16)
  REGION 1..11: note = C-term amide
HPQGTFTSDYK

SEQ ID NO: 378 - protein, 29 aa, synthetic construct
  REGION 1..29: note = Description of Artificial Sequence: Synthetic peptide
  MOD_RES 17: note = Lys(C8)
  REGION 1..29: note = C-term amide
HGQGTFTSDYSKYLDEKAAREFIAWLLNT

SEQ ID NO: 379 - protein, 29 aa, synthetic construct
  REGION 1..29: note = Description of Artificial Sequence: Synthetic peptide
  MOD_RES 17: note = Lys(C12)
  REGION 1..29: note = C-term amide
HGQGTFTSDYSKYLDEKAAREFIAWLLNT

SEQ ID NO: 380 - protein, 29 aa, synthetic construct
  REGION 1..29: note = Description of Artificial Sequence: Synthetic peptide
  MOD_RES 17: note = Lys(C14)
  REGION 1..29: note = C-term amide
HGQGTFTSDYSKYLDEKAAREFIAWLLNT

SEQ ID NO: 381 - protein, 29 aa, synthetic construct
  REGION 1..29: note = Description of Artificial Sequence: Synthetic peptide
  MOD_RES 17: note = Lys(C16)
  REGION 1..29: note = C-term amide
HGQGTFTSDYSKYLDEKAAREFIAWLLNT

SEQ ID NO: 382 - protein, 29 aa, synthetic construct
  REGION 1..29: note = Description of Artificial Sequence: Synthetic peptide
  MOD_RES 17: note = Lys(C18)
  REGION 1..29: note = C-term amide
HGQGTFTSDYSKYLDEKAAREFIAWLLNT

SEQ ID NO: 383 - protein, 29 aa, synthetic construct
  REGION 1..29: note = Description of Artificial Sequence: Synthetic peptide
  MOD_RES 17: note = Lys(C20)
  REGION 1..29: note = C-term amide
HGQGTFTSDYSKYLDEKAAREFIAWLLNT

SEQ ID NO: 384 - protein, 29 aa, synthetic construct
  REGION 1..29: note = Description of Artificial Sequence: Synthetic peptide
  MOD_RES 17: note = Lys(C8)
  REGION 1..29: note = C-term amide
HGQGTFTSDYSKYLDEKAAKEFIAWLLNT

SEQ ID NO: 385 - protein, 29 aa, synthetic construct
  REGION 1..29: note = Description of Artificial Sequence: Synthetic peptide
  MOD_RES 17: note = Lys(C14)
  REGION 1..29: note = C-term amide
HGQGTFTSDYSKYLDEKAAKEFIAWLLNT

SEQ ID NO: 386 - protein, 29 aa, synthetic construct
  REGION 1..29: note = Description of Artificial Sequence: Synthetic peptide
  MOD_RES 17: note = Lys(C16)
  REGION 1..29: note = C-term amide
HGQGTFTSDYSKYLDEKAAKEFIAWLLNT

SEQ ID NO: 387 - protein, 29 aa, synthetic construct
  REGION 1..29: note = Description of Artificial Sequence: Synthetic peptide
  MOD_RES 17: note = Lys(C20)
  REGION 1..29: note = C-term amide
HGQGTFTSDYSKYLDEKAAKEFIAWLLNT

SEQ ID NO: 388 - protein, 29 aa, synthetic construct
  REGION 1..29: note = Description of Artificial Sequence: Synthetic peptide
  REGION 1..29: note = C-term amide
HGQGTFTSDYSKYLDEKAAKEFIAWLLNT

SEQ ID NO: 389 - protein, 29 aa, synthetic construct
  REGION 1..29: note = Description of Artificial Sequence: Synthetic peptide
  MOD_RES 17: note = Lys(C12)
  REGION 1..29: note = C-term amide
HGQGTFTSDYSKYLDEKAAKEFIAWLLNT

SEQ ID NO: 390 - protein, 29 aa, synthetic construct
  REGION 1..29: note = Description of Artificial Sequence: Synthetic peptide
  MOD_RES 17: note = Lys(C18)
  REGION 1..29: note = C-term amide
HGQGTFTSDYSKYLDEKAAKEFIAWLLNT

SEQ ID NO: 391 - protein, 29 aa, synthetic construct
  REGION 1..29: note = Description of Artificial Sequence: Synthetic peptide
  MOD_RES 2: note = Aib
  MOD_RES 17: note = Lys(C18)
  REGION 1..29: note = C-term amide
HXQGTFTSDYSKYLDEKAAKEFIAWLLNT

SEQ ID NO: 392 - protein, 29 aa, synthetic construct
  REGION 1..29: note = Description of Artificial Sequence: Synthetic peptide
  REGION 1..29: note = C-term amide
HGQGTFTSDYSKYLDERRAKDFVQWLLNT

SEQ ID NO: 393 - protein, 29 aa, synthetic construct
  REGION 1..29: note = Description of Artificial Sequence: Synthetic peptide
  MOD_RES 20: note = Lys(C12)
  REGION 1..29: note = C-term amide
HGQGTFTSDYSKYLDERRAKDFVQWLLNT

SEQ ID NO: 394 - protein, 29 aa, synthetic construct
  REGION 1..29: note = Description of Artificial Sequence: Synthetic peptide
  MOD_RES 20: note = Lys(C18)
  REGION 1..29: note = C-term amide
HGQGTFTSDYSKYLDERRAKDFVQWLLNT

SEQ ID NO: 395 - protein, 29 aa, synthetic construct
  REGION 1..29: note = Description of Artificial Sequence: Synthetic peptide
  MOD_RES 2: note = Aib
  MOD_RES 20: note = Lys(C18)
  REGION 1..29: note = C-term amide
HXQGTFTSDYSKYLDERRAKDFVQWLLNT

SEQ ID NO: 396 - protein, 29 aa, synthetic construct
  REGION 1..29: note = Description of Artificial Sequence: Synthetic peptide
  MOD_RES 2: note = Aib
  MOD_RES 20: note = Lys(C8)
  REGION 1..29: note = C-term amide
HXQGTFTSDYSKYLDERRAKDFVQWLLNT

SEQ ID NO: 397 - protein, 29 aa, synthetic construct
  REGION 1..29: note = Description of Artificial Sequence: Synthetic peptide
  MOD_RES 2: note = Aib
  MOD_RES 20: note = Lys(C12)
  REGION 1..29: note = C-term amide
HXQGTFTSDYSKYLDERRAKDFVQWLLNT

SEQ ID NO: 398 - protein, 29 aa, synthetic construct
  REGION 1..29: note = Description of Artificial Sequence: Synthetic peptide
  MOD_RES 2: note = Aib
  MOD_RES 20: note = Lys(C14)
  REGION 1..29: note = C-term amide
HXQGTFTSDYSKYLDERRAKDFVQWLLNT

SEQ ID NO: 399 - protein, 29 aa, synthetic construct
  REGION 1..29: note = Description of Artificial Sequence: Synthetic peptide
  MOD_RES 2: note = Aib
  MOD_RES 20: note = Lys(C16)
  REGION 1..29: note = C-term amide
HXQGTFTSDYSKYLDERRAKDFVQWLLNT

SEQ ID NO: 400 - protein, 29 aa, synthetic construct
  REGION 1..29: note = Description of Artificial Sequence: Synthetic peptide
  MOD_RES 2: note = Aib
  MOD_RES 20: note = Lys(C18)
  REGION 1..29: note = C-term amide
HXQGTFTSDYSKYLDERRAKDFVQWLLNT

SEQ ID NO: 401 - protein, 29 aa, synthetic construct
  REGION 1..29: note = Description of Artificial Sequence: Synthetic peptide
  MOD_RES 2: note = Aib
  MOD_RES 20: note = Lys(C20)
  REGION 1..29: note = C-term amide
HXQGTFTSDYSKYLDERRAKDFVQWLLNT

SEQ ID NO: 402 - protein, 29 aa, synthetic construct
  REGION 1..29: note = Description of Artificial Sequence: Synthetic peptide
  MOD_RES 20: note = Lys(C8)
  REGION 1..29: note = C-term amide
HGQGTFTSDYSKYLDERRAKDFVQWLLNT

SEQ ID NO: 403 - protein, 29 aa, synthetic construct
  REGION 1..29: note = Description of Artificial Sequence: Synthetic peptide
  MOD_RES 20: note = Lys(C12)
  REGION 1..29: note = C-term amide
HGQGTFTSDYSKYLDERRAKDFVQWLLNT

SEQ ID NO: 404 - protein, 29 aa, synthetic construct
  REGION 1..29: note = Description of Artificial Sequence: Synthetic peptide
  MOD_RES 20: note = Lys(C14)
  REGION 1..29: note = C-term amide
HGQGTFTSDYSKYLDERRAKDFVQWLLNT

SEQ ID NO: 405 - protein, 29 aa, synthetic construct
  REGION 1..29: note = Description of Artificial Sequence: Synthetic peptide
  MOD_RES 20: note = Lys(C16)
  REGION 1..29: note = C-term amide
HGQGTFTSDYSKYLDERRAKDFVQWLLNT

SEQ ID NO: 406 - protein, 29 aa, synthetic construct
  REGION 1..29: note = Description of Artificial Sequence: Synthetic peptide
  MOD_RES 20: note = Lys(C18)
  REGION 1..29: note = C-term amide
HGQGTFTSDYSKYLDERRAKDFVQWLLNT

SEQ ID NO: 407 - protein, 29 aa, synthetic construct
  REGION 1..29: note = Description of Artificial Sequence: Synthetic peptide
  MOD_RES 20: note = Lys(C20)
  REGION 1..29: note = C-term amide
HGQGTFTSDYSKYLDERRAKDFVQWLLNT

SEQ ID NO: 408 - protein, 29 aa, synthetic construct
  REGION 1..29: note = Description of Artificial Sequence: Synthetic peptide
  MOD_RES 2: note = Aib
  MOD_RES 17: note = Lys(C8)
  REGION 1..29: note = C-term amide
HXQGTFTSDYSKYLDEKAAKEFIAWLLNT

SEQ ID NO: 409 - protein, 29 aa, synthetic construct
  REGION 1..29: note = Description of Artificial Sequence: Synthetic peptide
  MOD_RES 2: note = Aib
  MOD_RES 17: note = Lys(C12)
  REGION 1..29: note = C-term amide
HXQGTFTSDYSKYLDEKAAKEFIAWLLNT

SEQ ID NO: 410 - protein, 29 aa, synthetic construct
  REGION 1..29: note = Description of Artificial Sequence: Synthetic peptide
  MOD_RES 2: note = Aib
  MOD_RES 17: note = Lys(C14)
  REGION 1..29: note = C-term amide
HXQGTFTSDYSKYLDEKAAKEFIAWLLNT

SEQ ID NO: 411 - protein, 29 aa, synthetic construct
  REGION 1..29: note = Description of Artificial Sequence: Synthetic peptide
  MOD_RES 2: note = Aib
  MOD_RES 17: note = Lys(C16)
  REGION 1..29: note = C-term amide
HXQGTFTSDYSKYLDEKAAKEFIAWLLNT

SEQ ID NO: 412 - protein, 29 aa, synthetic construct
  REGION 1..29: note = Description of Artificial Sequence: Synthetic peptide
  MOD_RES 2: note = Aib
  MOD_RES 17: note = Lys(C18)
  REGION 1..29: note = C-term amide
HXQGTFTSDYSKYLDEKAAKEFIAWLLNT

SEQ ID NO: 413 - protein, 29 aa, synthetic construct
  REGION 1..29: note = Description of Artificial Sequence: Synthetic peptide
  MOD_RES 2: note = Aib
  MOD_RES 17: note = Lys(C20)
  REGION 1..29: note = C-term amide
HXQGTFTSDYSKYLDEKAAKEFIAWLLNT

SEQ ID NO: 414 - protein, 29 aa, synthetic construct
  REGION 1..29: note = Description of Artificial Sequence: Synthetic peptide
  MOD_RES 2: note = Aib
  REGION 16..20: note = misc_feature - Cyclic
  MOD_RES 16: note = Glu is cyclized through side chain to form a lactam linkage
  MOD_RES 20: note = Lys is cyclized through side chain to form a lactam linkage
  MOD_RES 24: note = Lys(C8)
  REGION 1..29: note = C-term amide
HXQGTFTSDYSKYLDEQAAKEFIKWLMNT

SEQ ID NO: 415 - protein, 29 aa, synthetic construct
  REGION 1..29: note = Description of Artificial Sequence: Synthetic peptide
  MOD_RES 2: note = Aib
  REGION 16..20: note = misc_feature - Cyclic
  MOD_RES 16: note = Glu is cyclized through side chain to form a lactam linkage
  MOD_RES 20: note = Lys is cyclized through side chain to form a lactam linkage
  MOD_RES 24: note = Lys(C12)
  REGION 1..29: note = C-term amide
HXQGTFTSDYSKYLDEQAAKEFIKWLMNT

SEQ ID NO: 416 - protein, 29 aa, synthetic construct
  REGION 1..29: note = Description of Artificial Sequence: Synthetic peptide
  MOD_RES 2: note = Aib
  REGION 16..20: note = misc_feature - Cyclic
  MOD_RES 16: note = Glu is cyclized through side chain to form a lactam linkage
  MOD_RES 20: note = Lys is cyclized through side chain to form a lactam linkage
  MOD_RES 24: note = Lys(C14)
  REGION 1..29: note = C-term amide
HXQGTFTSDYSKYLDEQAAKEFIKWLMNT

SEQ ID NO: 417 - protein, 29 aa, synthetic construct
  REGION 1..29: note = Description of Artificial Sequence: Synthetic peptide
  MOD_RES 2: note = Aib
  REGION 16..20: note = misc_feature - Cyclic
  MOD_RES 16: note = Glu is cyclized through side chain to form a lactam linkage
  MOD_RES 20: note = Lys is cyclized through side chain to form a lactam linkage
  MOD_RES 24: note = Lys(C16)
  REGION 1..29: note = C-term amide
HXQGTFTSDYSKYLDEQAAKEFIKWLMNT

SEQ ID NO: 418 - protein, 29 aa, synthetic construct
  REGION 1..29: note = Description of Artificial Sequence: Synthetic peptide
  MOD_RES 2: note = Aib
  REGION 16..20: note = misc_feature - Cyclic
  MOD_RES 16: note = Glu is cyclized through side chain to form a lactam linkage
  MOD_RES 20: note = Lys is cyclized through side chain to form a lactam linkage
  MOD_RES 24: note = Lys(C18)
  REGION 1..29: note = C-term amide
HXQGTFTSDYSKYLDEQAAKEFIKWLMNT

SEQ ID NO: 419 - protein, 29 aa, synthetic construct
  REGION 1..29: note = Description of Artificial Sequence: Synthetic peptide
  MOD_RES 2: note = Aib
  REGION 16..20: note = misc_feature - Cyclic
  MOD_RES 16: note = Glu is cyclized through side chain to form a lactam linkage
  MOD_RES 20: note = Lys is cyclized through side chain to form a lactam linkage
  MOD_RES 24: note = Lys(C20)
  REGION 1..29: note = C-term amide
HXQGTFTSDYSKYLDEQAAKEFIKWLMNT

SEQ ID NO: 420 - protein, 29 aa, synthetic construct
  REGION 1..29: note = Description of Artificial Sequence: Synthetic peptide
  MOD_RES 2: note = Aib
  REGION 16..20: note = misc_feature - Cyclic
  MOD_RES 16: note = Glu is cyclized through side chain to form a lactam linkage
  MOD_RES 20: note = Lys is cyclized through side chain to form a lactam linkage
  MOD_RES 24: note = Lys(C8)
  REGION 1..29: note = C-term amide
HXQGTFTSDYSKYLDEQAAKEFIKWLLNT

SEQ ID NO: 421 - protein, 29 aa, synthetic construct
  REGION 1..29: note = Description of Artificial Sequence: Synthetic peptide
  MOD_RES 2: note = Aib
  REGION 16..20: note = misc_feature - Cyclic
  MOD_RES 16: note = Glu is cyclized through side chain to form a lactam linkage
  MOD_RES 20: note = Lys is cyclized through side chain to form a lactam linkage
  MOD_RES 24: note = Lys(C12)
  REGION 1..29: note = C-term amide
HXQGTFTSDYSKYLDEQAAKEFIKWLLNT

SEQ ID NO: 422 - protein, 29 aa, synthetic construct
  REGION 1..29: note = Description of Artificial Sequence: Synthetic peptide
  MOD_RES 2: note = Aib
  REGION 16..20: note = misc_feature - Cyclic
  MOD_RES 16: note = Glu is cyclized through side chain to form a lactam linkage
  MOD_RES 20: note = Lys is cyclized through side chain to form a lactam linkage
  MOD_RES 24: note = Lys(C14)
  REGION 1..29: note = C-term amide
HXQGTFTSDYSKYLDEQAAKEFIKWLLNT

SEQ ID NO: 423 - protein, 29 aa, synthetic construct
  REGION 1..29: note = Description of Artificial Sequence: Synthetic peptide
  MOD_RES 2: note = Aib
  REGION 16..20: note = misc_feature - Cyclic
  MOD_RES 16: note = Glu is cyclized through side chain to form a lactam linkage
  MOD_RES 20: note = Lys is cyclized through side chain to form a lactam linkage
  MOD_RES 24: note = Lys(C16)
  REGION 1..29: note = C-term amide
HXQGTFTSDYSKYLDEQAAKEFIKWLLNT

SEQ ID NO: 424 - protein, 29 aa, synthetic construct
  REGION 1..29: note = Description of Artificial Sequence: Synthetic peptide
  MOD_RES 2: note = Aib
  REGION 16..20: note = misc_feature - Cyclic
  MOD_RES 16: note = Glu is cyclized through side chain to form a lactam linkage
  MOD_RES 20: note = Lys is cyclized through side chain to form a lactam linkage
  MOD_RES 24: note = Lys(C18)
  REGION 1..29: note = C-term amide
HXQGTFTSDYSKYLDEQAAKEFIKWLLNT

SEQ ID NO: 425 - protein, 29 aa, synthetic construct
  REGION 1..29: note = Description of Artificial Sequence: Synthetic peptide
  MOD_RES 2: note = Aib
  REGION 16..20: note = misc_feature - Cyclic
  MOD_RES 16: note = Glu is cyclized through side chain to form a lactam linkage
  MOD_RES 20: note = Lys is cyclized through side chain to form a lactam linkage
  MOD_RES 24: note = Lys(C20)
  REGION 1..29: note = C-term amide
HXQGTFTSDYSKYLDEQAAKEFIKWLLNT

SEQ ID NO: 426 - protein, 29 aa, synthetic construct
  REGION 1..29: note = Description of Artificial Sequence: Synthetic peptide
  MOD_RES 24: note = Lys(C8)
  REGION 1..29: note = C-term amide
HGQGTFTSDYSKYLDEQAAREFIKWLLNT

SEQ ID NO: 427 - protein, 29 aa, synthetic construct
  REGION 1..29: note = Description of Artificial Sequence: Synthetic peptide
  MOD_RES 24: note = Lys(C12)
  REGION 1..29: note = C-term amide
HGQGTFTSDYSKYLDEQAAREFIKWLLNT

SEQ ID NO: 428 - protein, 29 aa, synthetic construct
  REGION 1..29: note = Description of Artificial Sequence: Synthetic peptide
  MOD_RES 24: note = Lys(C14)
  REGION 1..29: note = C-term amide
HGQGTFTSDYSKYLDEQAAREFIKWLLNT

SEQ ID NO: 429 - protein, 29 aa, synthetic construct
  REGION 1..29: note = Description of Artificial Sequence: Synthetic peptide
  MOD_RES 24: note = Lys(C16)
  REGION 1..29: note = C-term amide
HGQGTFTSDYSKYLDEQAAREFIKWLLNT

SEQ ID NO: 430 - protein, 29 aa, synthetic construct
  REGION 1..29: note = Description of Artificial Sequence: Synthetic peptide
  MOD_RES 24: note = Lys(C18)
  REGION 1..29: note = C-term amide
HGQGTFTSDYSKYLDEQAAREFIKWLLNT

SEQ ID NO: 431 - protein, 29 aa, synthetic construct
  REGION 1..29: note = Description of Artificial Sequence: Synthetic peptide
  MOD_RES 24: note = Lys(C20)
  REGION 1..29: note = C-term amide
HGQGTFTSDYSKYLDEQAAREFIKWLLNT

SEQ ID NO: 432 - protein, 29 aa, synthetic construct
  REGION 1..29: note = Description of Artificial Sequence: Synthetic peptide
  MOD_RES 2: note = Aib
  MOD_RES 17: note = Lys(C8)
  REGION 1..29: note = C-term amide
HXQGTFTSDYSKYLDEKAAREFIAWLLNT

SEQ ID NO: 433 - protein, 29 aa, synthetic construct
  REGION 1..29: note = Description of Artificial Sequence: Synthetic peptide
  MOD_RES 2: note = Aib
  MOD_RES 17: note = Lys(C12)
  REGION 1..29: note = C-term amide
HXQGTFTSDYSKYLDEKAAREFIAWLLNT

SEQ ID NO: 434 - protein, 29 aa, synthetic construct
  REGION 1..29: note = Description of Artificial Sequence: Synthetic peptide
  MOD_RES 2: note = Aib
  MOD_RES 17: note = Lys(C14)
  REGION 1..29: note = C-term amide
HXQGTFTSDYSKYLDEKAAREFIAWLLNT

SEQ ID NO: 435 - protein, 29 aa, synthetic construct
  REGION 1..29: note = Description of Artificial Sequence: Synthetic peptide
  MOD_RES 2: note = Aib
  MOD_RES 17: note = Lys(C16)
  REGION 1..29: note = C-term amide
HXQGTFTSDYSKYLDEKAAREFIAWLLNT

SEQ ID NO: 436 - protein, 29 aa, synthetic construct
  REGION 1..29: note = Description of Artificial Sequence: Synthetic peptide
  MOD_RES 2: note = Aib
  MOD_RES 17: note = Lys(C18)
  REGION 1..29: note = C-term amide
HXQGTFTSDYSKYLDEKAAREFIAWLLNT

SEQ ID NO: 437 - protein, 29 aa, synthetic construct
  REGION 1..29: note = Description of Artificial Sequence: Synthetic peptide
  MOD_RES 2: note = Aib
  MOD_RES 17: note = Lys(C20)
  REGION 1..29: note = C-term amide
HXQGTFTSDYSKYLDEKAAREFIAWLLNT

SEQ ID NO: 438 - protein, 29 aa, synthetic construct
  REGION 1..29: note = Description of Artificial Sequence: Synthetic peptide
  MOD_RES 24: note = Lys(C8)
  REGION 1..29: note = C-term amide
HGQGTFTSDYSKYLDERRAQDFVKWLLNT

SEQ ID NO: 439 - protein, 29 aa, synthetic construct
  REGION 1..29: note = Description of Artificial Sequence: Synthetic peptide
  MOD_RES 24: note = Lys(C12)
  REGION 1..29: note = C-term amide
HGQGTFTSDYSKYLDERRAQDFVKWLLNT

SEQ ID NO: 440 - protein, 29 aa, synthetic construct
  REGION 1..29: note = Description of Artificial Sequence: Synthetic peptide
  MOD_RES 24: note = Lys(C14)
  REGION 1..29: note = C-term amide
HGQGTFTSDYSKYLDERRAQDFVKWLLNT

SEQ ID NO: 441 - protein, 29 aa, synthetic construct
  REGION 1..29: note = Description of Artificial Sequence: Synthetic peptide
  MOD_RES 24: note = Lys(C16)
  REGION 1..29: note = C-term amide
HGQGTFTSDYSKYLDERRAQDFVKWLLNT

SEQ ID NO: 442 - protein, 29 aa, synthetic construct
  REGION 1..29: note = Description of Artificial Sequence: Synthetic peptide
  MOD_RES 24: note = Lys(C18)
  REGION 1..29: note = C-term amide
HGQGTFTSDYSKYLDERRAQDFVKWLLNT

SEQ ID NO: 443 - protein, 29 aa, synthetic construct
  REGION 1..29: note = Description of Artificial Sequence: Synthetic peptide
  MOD_RES 24: note = Lys(C20)
  REGION 1..29: note = C-term amide
HGQGTFTSDYSKYLDERRAQDFVKWLLNT

SEQ ID NO: 444 - protein, 11 aa, synthetic construct
  REGION 1..11: note = Description of Artificial Sequence: Synthetic peptide
  MOD_RES 2: note = Alpha-MePro
  MOD_RES 6: note = Alpha-MeF
  MOD_RES 10: note = Bip
  MOD_RES 11: note = Lys(C8)
  REGION 1..11: note = C-term amide
HPQGTFTSDXK

SEQ ID NO: 445 - protein, 11 aa, synthetic construct
  REGION 1..11: note = Description of Artificial Sequence: Synthetic peptide
  MOD_RES 2: note = Alpha-MePro
  MOD_RES 6: note = Alpha-MeF
  MOD_RES 10: note = Bip
  MOD_RES 11: note = Lys(C12)
  REGION 1..11: note = C-term amide
HPQGTFTSDXK

SEQ ID NO: 446 - protein, 11 aa, synthetic construct
  REGION 1..11: note = Description of Artificial Sequence: Synthetic peptide
  MOD_RES 2: note = Alpha-MePro
  MOD_RES 6: note = Alpha-MeF
  MOD_RES 10: note = Bip
  MOD_RES 11: note = Lys(C14)
  REGION 1..11: note = C-term amide
HPQGTFTSDXK

SEQ ID NO: 447 - protein, 11 aa, synthetic construct
  REGION 1..11: note = Description of Artificial Sequence: Synthetic peptide
  MOD_RES 2: note = Alpha-MePro
  MOD_RES 6: note = Alpha-MeF
  MOD_RES 10: note = Bip
  MOD_RES 11: note = Lys(C16)
  REGION 1..11: note = C-term amide
HPQGTFTSDXK

SEQ ID NO: 448 - protein, 11 aa, synthetic construct
  REGION 1..11: note = Description of Artificial Sequence: Synthetic peptide
  MOD_RES 2: note = Alpha-MePro
  MOD_RES 6: note = Alpha-MeF
  MOD_RES 10: note = Bip
  MOD_RES 11: note = Lys(C18)
  REGION 1..11: note = C-term amide
HPQGTFTSDXK

SEQ ID NO: 449 - protein, 11 aa, synthetic construct
  REGION 1..11: note = Description of Artificial Sequence: Synthetic peptide
  MOD_RES 2: note = Alpha-MePro
  MOD_RES 6: note = Alpha-MeF
  MOD_RES 10: note = Bip
  MOD_RES 11: note = Lys(C20)
  REGION 1..11: note = C-term amide
HPQGTFTSDXK

SEQ ID NO: 450 - protein, 11 aa, synthetic construct
  REGION 1..11: note = Description of Artificial Sequence: Synthetic peptide
  MOD_RES 2: note = Alpha-MePro
  MOD_RES 6: note = Alpha-MeFF
  MOD_RES 10: note = Bip
  MOD_RES 11: note = Lys(C8)
  REGION 1..11: note = C-term amide
HPQGTFTSDXK

SEQ ID NO: 451 - protein, 11 aa, synthetic construct
  REGION 1..11: note = Description of Artificial Sequence: Synthetic peptide
  MOD_RES 2: note = Alpha-MePro
  MOD_RES 6: note = Alpha-MeFF
  MOD_RES 10: note = Bip
  MOD_RES 11: note = Lys(C12)
  REGION 1..11: note = C-term amide
HPQGTFTSDXK

SEQ ID NO: 452 - protein, 11 aa, synthetic construct
  REGION 1..11: note = Description of Artificial Sequence: Synthetic peptide
  MOD_RES 2: note = Alpha-MePro
  MOD_RES 6: note = Alpha-MeFF
  MOD_RES 10: note = Bip
  MOD_RES 11: note = Lys(C14)
  REGION 1..11: note = C-term amide
HPQGTFTSDXK

SEQ ID NO: 453 - protein, 11 aa, synthetic construct
  REGION 1..11: note = Description of Artificial Sequence: Synthetic peptide
  MOD_RES 2: note = Alpha-MePro
  MOD_RES 6: note = Alpha-MeFF
  MOD_RES 10: note = Bip
  MOD_RES 11: note = Lys(C16)
  REGION 1..11: note = C-term amide
HPQGTFTSDXK

SEQ ID NO: 454 - protein, 11 aa, synthetic construct
  REGION 1..11: note = Description of Artificial Sequence: Synthetic peptide
  MOD_RES 2: note = Alpha-MePro
  MOD_RES 6: note = Alpha-MeFF
  MOD_RES 10: note = Bip
  MOD_RES 11: note = Lys(C18)
  REGION 1..11: note = C-term amide
HPQGTFTSDXK

SEQ ID NO: 455 - protein, 11 aa, synthetic construct
  REGION 1..11: note = Description of Artificial Sequence: Synthetic peptide
  MOD_RES 2: note = Alpha-MePro
  MOD_RES 6: note = Alpha-MeFF
  MOD_RES 10: note = Bip
  MOD_RES 11: note = Lys(C20)
  REGION 1..11: note = C-term amide
HPQGTFTSDXK

SEQ ID NO: 456 - protein, 11 aa, synthetic construct
  REGION 1..11: note = Description of Artificial Sequence: Synthetic peptide
  MOD_RES 2: note = Aib
  MOD_RES 6: note = Alpha-MeF
  MOD_RES 10: note = Bip
  MOD_RES 11: note = Lys(C8)
  REGION 1..11: note = C-term amide
HXQGTFTSDXK

SEQ ID NO: 457 - protein, 11 aa, synthetic construct
  REGION 1..11: note = Description of Artificial Sequence: Synthetic peptide
  MOD_RES 2: note = Aib
  MOD_RES 6: note = Alpha-MeF
  MOD_RES 10: note = Bip
  MOD_RES 11: note = Lys(C12)
  REGION 1..11: note = C-term amide
HXQGTFTSDXK

SEQ ID NO: 458 - protein, 11 aa, synthetic construct
  REGION 1..11: note = Description of Artificial Sequence: Synthetic peptide
  MOD_RES 2: note = Aib
  MOD_RES 6: note = Alpha-MeF
  MOD_RES 10: note = Bip
  MOD_RES 11: note = Lys(C14)
  REGION 1..11: note = C-term amide
HXQGTFTSDXK

SEQ ID NO: 459 - protein, 11 aa, synthetic construct
  REGION 1..11: note = Description of Artificial Sequence: Synthetic peptide
  MOD_RES 2: note = Aib
  MOD_RES 6: note = Alpha-MeF
  MOD_RES 10: note = Bip
  MOD_RES 11: note = Lys(C16)
  REGION 1..11: note = C-term amide
HXQGTFTSDXK

SEQ ID NO: 460 - protein, 29 aa, synthetic construct
  REGION 1..29: note = Description of Artificial Sequence: Synthetic peptide
  MOD_RES 17: note = Lys(C16)
  REGION 1..29: note = C-term amide
HGQGTFTSDYSKYLDAKAAREFIAWLLNT

SEQ ID NO: 461 - protein, 29 aa, synthetic construct
  REGION 1..29: note = Description of Artificial Sequence: Synthetic peptide
  MOD_RES 17: note = Lys(C18)
  REGION 1..29: note = C-term amide
HGQGTFTSDYSKYLDAKAAREFIAWLLNT

SEQ ID NO: 462 - protein, 29 aa, synthetic construct
  REGION 1..29: note = Description of Artificial Sequence: Synthetic peptide
  MOD_RES 17: note = Lys(C20)
  REGION 1..29: note = C-term amide
HGQGTFTSDYSKYLDAKAAREFIAWLLNT

SEQ ID NO: 463 - protein, 29 aa, synthetic construct
  REGION 1..29: note = Description of Artificial Sequence: Synthetic peptide
  MOD_RES 17: note = Lys(C8)
  REGION 1..29: note = C-term amide
HGQGTFTSDYSKYLDAKAAKEFIAWLLNT

SEQ ID NO: 464 - protein, 29 aa, synthetic construct
  REGION 1..29: note = Description of Artificial Sequence: Synthetic peptide
  MOD_RES 17: note = Lys(C12)
  REGION 1..29: note = C-term amide
HGQGTFTSDYSKYLDAKAAKEFIAWLLNT

SEQ ID NO: 465 - protein, 29 aa, synthetic construct
  REGION 1..29: note = Description of Artificial Sequence: Synthetic peptide
  MOD_RES 17: note = Lys(C14)
  REGION 1..29: note = C-term amide
HGQGTFTSDYSKYLDAKAAKEFIAWLLNT

SEQ ID NO: 466 - protein, 29 aa, synthetic construct
  REGION 1..29: note = Description of Artificial Sequence: Synthetic peptide
  MOD_RES 17: note = Lys(C16)
  REGION 1..29: note = C-term amide
HGQGTFTSDYSKYLDAKAAKEFIAWLLNT

SEQ ID NO: 467 - protein, 29 aa, synthetic construct
  REGION 1..29: note = Description of Artificial Sequence: Synthetic peptide
  MOD_RES 17: note = Lys(C18)
  REGION 1..29: note = C-term amide
HGQGTFTSDYSKYLDAKAAKEFIAWLLNT

SEQ ID NO: 468 - protein, 29 aa, synthetic construct
  REGION 1..29: note = Description of Artificial Sequence: Synthetic peptide
  MOD_RES 17: note = Lys(C20)
  REGION 1..29: note = C-term amide
HGQGTFTSDYSKYLDAKAAKEFIAWLLNT

SEQ ID NO: 469 - protein, 29 aa, synthetic construct
  REGION 1..29: note = Description of Artificial Sequence: Synthetic peptide
  MOD_RES 16: note = Aib
  MOD_RES 17: note = Lys(C8)
  REGION 1..29: note = C-term amide
HGQGTFTSDYSKYLDXKAAKEFIAWLLNT

SEQ ID NO: 470 - protein, 29 aa, synthetic construct
  REGION 1..29: note = Description of Artificial Sequence: Synthetic peptide
  MOD_RES 16: note = Aib
  MOD_RES 17: note = Lys(C12)
  REGION 1..29: note = C-term amide
HGQGTFTSDYSKYLDXKAAKEFIAWLLNT

SEQ ID NO: 471 - protein, 29 aa, synthetic construct
  REGION 1..29: note = Description of Artificial Sequence: Synthetic peptide
  MOD_RES 16: note = Aib
  MOD_RES 17: note = Lys(C14)
  REGION 1..29: note = C-term amide
HGQGTFTSDYSKYLDXKAAKEFIAWLLNT

SEQ ID NO: 472 - protein, 29 aa, synthetic construct
  REGION 1..29: note = Description of Artificial Sequence: Synthetic peptide
  MOD_RES 16: note = Aib
  MOD_RES 17: note = Lys(C16)
  REGION 1..29: note = C-term amide
HGQGTFTSDYSKYLDXKAAKEFIAWLLNT

SEQ ID NO: 473 - protein, 29 aa, synthetic construct
  REGION 1..29: note = Description of Artificial Sequence: Synthetic peptide
  MOD_RES 16: note = Aib
  MOD_RES 17: note = Lys(C18)
  REGION 1..29: note = C-term amide
HGQGTFTSDYSKYLDXKAAKEFIAWLLNT

SEQ ID NO: 474 - protein, 29 aa, synthetic construct
  REGION 1..29: note = Description of Artificial Sequence: Synthetic peptide
  MOD_RES 16: note = Aib
  MOD_RES 17: note = Lys(C20)
  REGION 1..29: note = C-term amide
HGQGTFTSDYSKYLDXKAAKEFIAWLLNT

SEQ ID NO: 475 - protein, 29 aa, synthetic construct
  REGION 1..29: note = Description of Artificial Sequence: Synthetic peptide
  MOD_RES 16: note = Aib
  MOD_RES 17: note = Lys(C8)
  REGION 1..29: note = C-term amide
HGQGTFTSDYSKYLDXKAAREFIAWLLNT

SEQ ID NO: 476 - protein, 29 aa, synthetic construct
  REGION 1..29: note = Description of Artificial Sequence: Synthetic peptide
  MOD_RES 16: note = Aib
  MOD_RES 17: note = Lys(C12)
  REGION 1..29: note = C-term amide
HGQGTFTSDYSKYLDXKAAREFIAWLLNT

SEQ ID NO: 477 - protein, 29 aa, synthetic construct
  REGION 1..29: note = Description of Artificial Sequence: Synthetic peptide
  MOD_RES 16: note = Aib
  MOD_RES 17: note = Lys(C14)
  REGION 1..29: note = C-term amide
HGQGTFTSDYSKYLDXKAAREFIAWLLNT

SEQ ID NO: 478 - protein, 29 aa, synthetic construct
  REGION 1..29: note = Description of Artificial Sequence: Synthetic peptide
  MOD_RES 16: note = Aib
  MOD_RES 17: note = Lys(C16)
  REGION 1..29: note = C-term amide
HGQGTFTSDYSKYLDXKAAREFIAWLLNT

SEQ ID NO: 479 - protein, 29 aa, synthetic construct
  REGION 1..29: note = Description of Artificial Sequence: Synthetic peptide
  MOD_RES 16: note = Aib
  MOD_RES 17: note = Lys(C18)
  REGION 1..29: note = C-term amide
HGQGTFTSDYSKYLDXKAAREFIAWLLNT

SEQ ID NO: 480 - protein, 29 aa, synthetic construct
  REGION 1..29: note = Description of Artificial Sequence: Synthetic peptide
  MOD_RES 16: note = Aib
  MOD_RES 17: note = Lys(C20)
  REGION 1..29: note = C-term amide
HGQGTFTSDYSKYLDXKAAREFIAWLLNT

SEQ ID NO: 481 - protein, 29 aa, synthetic construct
  REGION 1..29: note = Description of Artificial Sequence: Synthetic peptide
  MOD_RES 2: note = Aib
  MOD_RES 17: note = Lys(C8)
  REGION 1..29: note = C-term amide
HXQGTFTSDYSKYLDAKAAKEFIAWLLNT

SEQ ID NO: 482 - protein, 29 aa, synthetic construct
  REGION 1..29: note = Description of Artificial Sequence: Synthetic peptide
  MOD_RES 2: note = Aib
  MOD_RES 17: note = Lys(C12)
  REGION 1..29: note = C-term amide
HXQGTFTSDYSKYLDAKAAKEFIAWLLNT

SEQ ID NO: 483 - protein, 29 aa, synthetic construct
  REGION 1..29: note = Description of Artificial Sequence: Synthetic peptide
  MOD_RES 2: note = Aib
  MOD_RES 17: note = Lys(C14)
  REGION 1..29: note = C-term amide
HXQGTFTSDYSKYLDAKAAKEFIAWLLNT

SEQ ID NO: 484 - protein, 29 aa, synthetic construct
  REGION 1..29: note = Description of Artificial Sequence: Synthetic peptide
  MOD_RES 2: note = Aib
  MOD_RES 17: note = Lys(C16)
  REGION 1..29: note = C-term amide
HXQGTFTSDYSKYLDAKAAKEFIAWLLNT

SEQ ID NO: 485 - protein, 29 aa, synthetic construct
  REGION 1..29: note = Description of Artificial Sequence: Synthetic peptide
  MOD_RES 2: note = Aib
  MOD_RES 17: note = Lys(C18)
  REGION 1..29: note = C-term amide
HXQGTFTSDYSKYLDAKAAKEFIAWLLNT

SEQ ID NO: 486 - protein, 29 aa, synthetic construct
  REGION 1..29: note = Description of Artificial Sequence: Synthetic peptide
  MOD_RES 2: note = Aib
  MOD_RES 17: note = Lys(C20)
  REGION 1..29: note = C-term amide
HXQGTFTSDYSKYLDAKAAKEFIAWLLNT

SEQ ID NO: 487 - protein, 29 aa, synthetic construct
  REGION 1..29: note = Description of Artificial Sequence: Synthetic peptide
  MOD_RES 2: note = Aib
  MOD_RES 17: note = Lys(C8)
  REGION 1..29: note = C-term amide
HXQGTFTSDYSKYLDAKAAREFIAWLLNT

SEQ ID NO: 488 - protein, 29 aa, synthetic construct
  REGION 1..29: note = Description of Artificial Sequence: Synthetic peptide
  MOD_RES 2: note = Aib
  MOD_RES 17: note = Lys(C12)
  REGION 1..29: note = C-term amide
HXQGTFTSDYSKYLDAKAAREFIAWLLNT

SEQ ID NO: 489 - protein, 29 aa, synthetic construct
  REGION 1..29: note = Description of Artificial Sequence: Synthetic peptide
  MOD_RES 2: note = Aib
  MOD_RES 17: note = Lys(C14)
  REGION 1..29: note = C-term amide
HXQGTFTSDYSKYLDAKAAREFIAWLLNT

SEQ ID NO: 490 - protein, 29 aa, synthetic construct
  REGION 1..29: note = Description of Artificial Sequence: Synthetic peptide
  MOD_RES 2: note = Aib
  MOD_RES 17: note = Lys(C16)
  REGION 1..29: note = C-term amide
HXQGTFTSDYSKYLDAKAAREFIAWLLNT

SEQ ID NO: 491 - protein, 29 aa, synthetic construct
  REGION 1..29: note = Description of Artificial Sequence: Synthetic peptide
  MOD_RES 2: note = Aib
  MOD_RES 17: note = Lys(C18)
  REGION 1..29: note = C-term amide
HXQGTFTSDYSKYLDAKAAREFIAWLLNT

SEQ ID NO: 492 - protein, 29 aa, synthetic construct
  REGION 1..29: note = Description of Artificial Sequence: Synthetic peptide
  MOD_RES 2: note = Aib
  MOD_RES 17: note = Lys(C20)
  REGION 1..29: note = C-term amide
HXQGTFTSDYSKYLDAKAAREFIAWLLNT

SEQ ID NO: 493 - protein, 29 aa, synthetic construct
  REGION 1..29: note = Description of Artificial Sequence: Synthetic peptide
  MOD_RES 24: note = Lys(C8)
  REGION 1..29: note = C-term amide
HGQGTFTSDYSKYLDAQAAREFIKWLLNT

SEQ ID NO: 494 - protein, 29 aa, synthetic construct
  REGION 1..29: note = Description of Artificial Sequence: Synthetic peptide
  MOD_RES 24: note = Lys(C12)
  REGION 1..29: note = C-term amide
HGQGTFTSDYSKYLDAQAAREFIKWLLNT

SEQ ID NO: 495 - protein, 29 aa, synthetic construct
  REGION 1..29: note = Description of Artificial Sequence: Synthetic peptide
  MOD_RES 24: note = Lys(C14)
  REGION 1..29: note = C-term amide
HGQGTFTSDYSKYLDAQAAREFIKWLLNT

SEQ ID NO: 496 - protein, 29 aa, synthetic construct
  REGION 1..29: note = Description of Artificial Sequence: Synthetic peptide
  MOD_RES 24: note = Lys(C16)
  REGION 1..29: note = C-term amide
HGQGTFTSDYSKYLDAQAAREFIKWLLNT

SEQ ID NO: 497 - protein, 29 aa, synthetic construct
  REGION 1..29: note = Description of Artificial Sequence: Synthetic peptide
  MOD_RES 24: note = Lys(C18)
  REGION 1..29: note = C-term amide
HGQGTFTSDYSKYLDAQAAREFIKWLLNT

SEQ ID NO: 498 - protein, 29 aa, synthetic construct
  REGION 1..29: note = Description of Artificial Sequence: Synthetic peptide
  MOD_RES 24: note = Lys(C20)
  REGION 1..29: note = C-term amide
HGQGTFTSDYSKYLDAQAAREFIKWLLNT

SEQ ID NO: 499 - protein, 29 aa, synthetic construct
  REGION 1..29: note = Description of Artificial Sequence: Synthetic peptide
  MOD_RES 20: note = Lys(C8)
  REGION 1..29: note = C-term amide
HGQGTFTSDYSKYLDARRAKDFVQWLLNT

SEQ ID NO: 500 - protein, 29 aa, synthetic construct
  REGION 1..29: note = Description of Artificial Sequence: Synthetic peptide
  MOD_RES 20: note = Lys(12)
  REGION 1..29: note = C-term amide
HGQGTFTSDYSKYLDARRAKDFVQWLLNT

SEQ ID NO: 501 - protein, 29 aa, synthetic construct
  REGION 1..29: note = Description of Artificial Sequence: Synthetic peptide
  MOD_RES 20: note = Lys(C14)
  REGION 1..29: note = C-term amide
HGQGTFTSDYSKYLDARRAKDFVQWLLNT

SEQ ID NO: 502 - protein, 29 aa, synthetic construct
  REGION 1..29: note = Description of Artificial Sequence: Synthetic peptide
  MOD_RES 20: note = Lys(C16)
  REGION 1..29: note = C-term amide
HGQGTFTSDYSKYLDARRAKDFVQWLLNT

SEQ ID NO: 503 - protein, 29 aa, synthetic construct
  REGION 1..29: note = Description of Artificial Sequence: Synthetic peptide
  MOD_RES 20: note = Lys(C18)
  REGION 1..29: note = C-term amide
HGQGTFTSDYSKYLDARRAKDFVQWLLNT

SEQ ID NO: 504 - protein, 29 aa, synthetic construct
  REGION 1..29: note = Description of Artificial Sequence: Synthetic peptide
  MOD_RES 20: note = Lys(C20)
  REGION 1..29: note = C-term amide
HGQGTFTSDYSKYLDARRAKDFVQWLLNT

SEQ ID NO: 505 - protein, 29 aa, synthetic construct
  REGION 1..29: note = Description of Artificial Sequence: Synthetic peptide
  MOD_RES 2: note = Aib
  MOD_RES 20: note = Lys(C18)
  REGION 1..29: note = C-term amide
HXQGTFTSDYSKYLDARRAKDFVQWLLNT

SEQ ID NO: 506 - protein, 29 aa, synthetic construct
  REGION 1..29: note = Description of Artificial Sequence: Synthetic peptide
  MOD_RES 2: note = Aib
  MOD_RES 20: note = Lys(C8)
  REGION 1..29: note = C-term amide
HXQGTFTSDYSKYLDARRAKDFVQWLLNT

SEQ ID NO: 507 - protein, 29 aa, synthetic construct
  REGION 1..29: note = Description of Artificial Sequence: Synthetic peptide
  MOD_RES 2: note = Aib
  MOD_RES 20: note = Lys(C14)
  REGION 1..29: note = C-term amide
HXQGTFTSDYSKYLDARRAKDFVQWLLNT

SEQ ID NO: 508 - protein, 29 aa, synthetic construct
  REGION 1..29: note = Description of Artificial Sequence: Synthetic peptide
  MOD_RES 2: note = Aib
  MOD_RES 20: note = Lys(C16)
  REGION 1..29: note = C-term amide
HXQGTFTSDYSKYLDARRAKDFVQWLLNT

SEQ ID NO: 509 - protein, 29 aa, synthetic construct
  REGION 1..29: note = Description of Artificial Sequence: Synthetic peptide
  MOD_RES 2: note = Aib
  MOD_RES 20: note = Lys(C20)
  REGION 1..29: note = C-term amide
HXQGTFTSDYSKYLDARRAKDFVQWLLNT

SEQ ID NO: 510 - protein, 29 aa, synthetic construct
  REGION 1..29: note = Description of Artificial Sequence: Synthetic peptide
  MOD_RES 24: note = Lys(C8)
  REGION 1..29: note = C-term amide
HGQGTFTSDYSKYLDARRAQDFVKWLLNT

SEQ ID NO: 511 - protein, 29 aa, synthetic construct
  REGION 1..29: note = Description of Artificial Sequence: Synthetic peptide
  MOD_RES 24: note = Lys(C12)
  REGION 1..29: note = C-term amide
HGQGTFTSDYSKYLDARRAQDFVKWLLNT

SEQ ID NO: 512 - protein, 29 aa, synthetic construct
  REGION 1..29: note = Description of Artificial Sequence: Synthetic peptide
  MOD_RES 24: note = Lys(C14)
  REGION 1..29: note = C-term amide
HGQGTFTSDYSKYLDARRAQDFVKWLLNT

SEQ ID NO: 513 - protein, 29 aa, synthetic construct
  REGION 1..29: note = Description of Artificial Sequence: Synthetic peptide
  MOD_RES 24: note = Lys(C16)
  REGION 1..29: note = C-term amide
HGQGTFTSDYSKYLDARRAQDFVKWLLNT

SEQ ID NO: 514 - protein, 29 aa, synthetic construct
  REGION 1..29: note = Description of Artificial Sequence: Synthetic peptide
  MOD_RES 24: note = Lys(C18)
  REGION 1..29: note = C-term amide
HGQGTFTSDYSKYLDARRAQDFVKWLLNT

SEQ ID NO: 515 - protein, 29 aa, synthetic construct
  REGION 1..29: note = Description of Artificial Sequence: Synthetic peptide
  MOD_RES 24: note = Lys(C20)
  REGION 1..29: note = C-term amide
HGQGTFTSDYSKYLDARRAQDFVKWLLNT

SEQ ID NO: 516 - protein, 29 aa, synthetic construct
  REGION 1..29: note = Description of Artificial Sequence: Synthetic peptide
  MOD_RES 2: note = Aib
  MOD_RES 16: note = Aib
  MOD_RES 17: note = Lys(C18)
  REGION 1..29: note = C-term amide
HXQGTFTSDYSKYLDXKAAKEFIAWLLNT

SEQ ID NO: 517 - protein, 29 aa, synthetic construct
  REGION 1..29: note = Description of Artificial Sequence: Synthetic peptide
  MOD_RES 2: note = Aib
  MOD_RES 16: note = Aib
  MOD_RES 17: note = Lys(C8)
  REGION 1..29: note = C-term amide
HXQGTFTSDYSKYLDXKAAKEFIAWLLNT

SEQ ID NO: 518 - protein, 29 aa, synthetic construct
  REGION 1..29: note = Description of Artificial Sequence: Synthetic peptide
  MOD_RES 2: note = Aib
  MOD_RES 16: note = Aib
  MOD_RES 17: note = Lys(C12)
  REGION 1..29: note = C-term amide
HXQGTFTSDYSKYLDXKAAKEFIAWLLNT

SEQ ID NO: 519 - protein, 29 aa, synthetic construct
  REGION 1..29: note = Description of Artificial Sequence: Synthetic peptide
  MOD_RES 2: note = Aib
  MOD_RES 16: note = Aib
  MOD_RES 17: note = Lys(C14)
  REGION 1..29: note = C-term amide
HXQGTFTSDYSKYLDXKAAKEFIAWLLNT

SEQ ID NO: 520 - protein, 29 aa, synthetic construct
  REGION 1..29: note = Description of Artificial Sequence: Synthetic peptide
  MOD_RES 2: note = Aib
  MOD_RES 16: note = Aib
  MOD_RES 17: note = Lys(C16)
  REGION 1..29: note = C-term amide
HXQGTFTSDYSKYLDXKAAKEFIAWLLNT

SEQ ID NO: 521 - protein, 29 aa, synthetic construct
  REGION 1..29: note = Description of Artificial Sequence: Synthetic peptide
  MOD_RES 2: note = Aib
  MOD_RES 16: note = Aib
  MOD_RES 17: note = Lys(C18)
  REGION 1..29: note = C-term amide
HXQGTFTSDYSKYLDXKAAKEFIAWLLNT

SEQ ID NO: 522 - protein, 29 aa, synthetic construct
  REGION 1..29: note = Description of Artificial Sequence: Synthetic peptide
  MOD_RES 2: note = Aib
  MOD_RES 16: note = Aib
  MOD_RES 17: note = Lys(C20)
  REGION 1..29: note = C-term amide
HXQGTFTSDYSKYLDXKAAKEFIAWLLNT

SEQ ID NO: 523 - protein, 29 aa, synthetic construct
  REGION 1..29: note = Description of Artificial Sequence: Synthetic peptide
  MOD_RES 2: note = Aib
  MOD_RES 16: note = Aib
  MOD_RES 17: note = Lys(C8)
  REGION 1..29: note = C-term amide
HXQGTFTSDYSKYLDXKAAREFIAWLLNT

SEQ ID NO: 524 - protein, 29 aa, synthetic construct
  REGION 1..29: note = Description of Artificial Sequence: Synthetic peptide
  MOD_RES 2: note = Aib
  MOD_RES 16: note = Aib
  MOD_RES 17: note = Lys(C12)
  REGION 1..29: note = C-term amide
HXQGTFTSDYSKYLDXKAAREFIAWLLNT

SEQ ID NO: 525 - protein, 29 aa, synthetic construct
  REGION 1..29: note = Description of Artificial Sequence: Synthetic peptide
  MOD_RES 2: note = Aib
  MOD_RES 16: note = Aib
  MOD_RES 17: note = Lys(C14)
  REGION 1..29: note = C-term amide
HXQGTFTSDYSKYLDXKAAREFIAWLLNT

SEQ ID NO: 526 - protein, 29 aa, synthetic construct
  REGION 1..29: note = Description of Artificial Sequence: Synthetic peptide
  MOD_RES 2: note = Aib
  MOD_RES 16: note = Aib
  MOD_RES 17: note = Lys(C16)
  REGION 1..29: note = C-term amide
HXQGTFTSDYSKYLDXKAAREFIAWLLNT

SEQ ID NO: 527 - protein, 29 aa, synthetic construct
  REGION 1..29: note = Description of Artificial Sequence: Synthetic peptide
  MOD_RES 2: note = Aib
  MOD_RES 16: note = Aib
  MOD_RES 17: note = Lys(C18)
  REGION 1..29: note = C-term amide
HXQGTFTSDYSKYLDXKAAREFIAWLLNT

SEQ ID NO: 528 - protein, 29 aa, synthetic construct
  REGION 1..29: note = Description of Artificial Sequence: Synthetic peptide
  MOD_RES 2: note = Aib
  MOD_RES 16: note = Aib
  MOD_RES 17: note = Lys(C20)
  REGION 1..29: note = C-term amide
HXQGTFTSDYSKYLDXKAAREFIAWLLNT

SEQ ID NO: 529 - protein, 29 aa, synthetic construct
  REGION 1..29: note = Description of Artificial Sequence: Synthetic peptide
  MOD_RES 2: note = Aib
  MOD_RES 16: note = Aib
  MOD_RES 20: note = Lys(C18)
  REGION 1..29: note = C-term amide
HXQGTFTSDYSKYLDXRRAKDFVQWLLNT

SEQ ID NO: 530 - protein, 29 aa, synthetic construct
  REGION 1..29: note = Description of Artificial Sequence: Synthetic peptide
  MOD_RES 2: note = Aib
  MOD_RES 16: note = Aib
  MOD_RES 20: note = Lys(C8)
  REGION 1..29: note = C-term amide
HXQGTFTSDYSKYLDXRRAKDFVQWLLNT

SEQ ID NO: 531 - protein, 29 aa, synthetic construct
  REGION 1..29: note = Description of Artificial Sequence: Synthetic peptide
  MOD_RES 2: note = Aib
  MOD_RES 16: note = Aib
  MOD_RES 20: note = Lys(C14)
  REGION 1..29: note = C-term amide
HXQGTFTSDYSKYLDXRRAKDFVQWLLNT

SEQ ID NO: 532 - protein, 29 aa, synthetic construct
  REGION 1..29: note = Description of Artificial Sequence: Synthetic peptide
  MOD_RES 2: note = Aib
  MOD_RES 16: note = Aib
  MOD_RES 20: note = Lys(C16)
  REGION 1..29: note = C-term amide
HXQGTFTSDYSKYLDXRRAKDFVQWLLNT

SEQ ID NO: 533 - protein, 29 aa, synthetic construct
  REGION 1..29: note = Description of Artificial Sequence: Synthetic peptide
  MOD_RES 2: note = Aib
  MOD_RES 16: note = Aib
  MOD_RES 20: note = Lys(C20)
  REGION 1..29: note = C-term amide
HXQGTFTSDYSKYLDXRRAKDFVQWLLNT

SEQ ID NO: 534 - protein, 29 aa, synthetic construct
  REGION 1..29: note = Description of Artificial Sequence: Synthetic peptide
  MOD_RES 16: note = Aib
  MOD_RES 20: note = Lys(C8)
  REGION 1..29: note = C-term amide
HGQGTFTSDYSKYLDXRRAKDFVQWLLNT

SEQ ID NO: 535 - protein, 29 aa, synthetic construct
  REGION 1..29: note = Description of Artificial Sequence: Synthetic peptide
  MOD_RES 16: note = Aib
  MOD_RES 20: note = Lys(C12)
  REGION 1..29: note = C-term amide
HGQGTFTSDYSKYLDXRRAKDFVQWLLNT

SEQ ID NO: 536 - protein, 29 aa, synthetic construct
  REGION 1..29: note = Description of Artificial Sequence: Synthetic peptide
  MOD_RES 16: note = Aib
  MOD_RES 20: note = Lys(C14)
  REGION 1..29: note = C-term amide
HGQGTFTSDYSKYLDXRRAKDFVQWLLNT

SEQ ID NO: 537 - protein, 29 aa, synthetic construct
  REGION 1..29: note = Description of Artificial Sequence: Synthetic peptide
  MOD_RES 16: note = Aib
  MOD_RES 20: note = Lys(C16)
  REGION 1..29: note = C-term amide
HGQGTFTSDYSKYLDXRRAKDFVQWLLNT

SEQ ID NO: 538 - protein, 29 aa, synthetic construct
  REGION 1..29: note = Description of Artificial Sequence: Synthetic peptide
  MOD_RES 16: note = Aib
  MOD_RES 20: note = Lys(C18)
  REGION 1..29: note = C-term amide
HGQGTFTSDYSKYLDXRRAKDFVQWLLNT

SEQ ID NO: 539 - protein, 29 aa, synthetic construct
  REGION 1..29: note = Description of Artificial Sequence: Synthetic peptide
  MOD_RES 16: note = Aib
  MOD_RES 20: note = Lys(C20)
  REGION 1..29: note = C-term amide
HGQGTFTSDYSKYLDXRRAKDFVQWLLNT

SEQ ID NO: 540 - protein, 29 aa, synthetic construct
  REGION 1..29: note = Description of Artificial Sequence: Synthetic peptide
  MOD_RES 16: note = Aib
  MOD_RES 24: note = Lys(C8)
  REGION 1..29: note = C-term amide
HGQGTFTSDYSKYLDXQAAREFIKWLLNT

SEQ ID NO: 541 - protein, 29 aa, synthetic construct
  REGION 1..29: note = Description of Artificial Sequence: Synthetic peptide
  MOD_RES 16: note = Aib
  MOD_RES 24: note = Lys(C12)
  REGION 1..29: note = C-term amide
HGQGTFTSDYSKYLDXQAAREFIKWLLNT

SEQ ID NO: 542 - protein, 29 aa, synthetic construct
  REGION 1..29: note = Description of Artificial Sequence: Synthetic peptide
  MOD_RES 16: note = Aib
  MOD_RES 24: note = Lys(C14)
  REGION 1..29: note = C-term amide
HGQGTFTSDYSKYLDXQAAREFIKWLLNT

SEQ ID NO: 543 - protein, 29 aa, synthetic construct
  REGION 1..29: note = Description of Artificial Sequence: Synthetic peptide
  MOD_RES 16: note = Aib
  MOD_RES 24: note = Lys(C16)
  REGION 1..29: note = C-term amide
HGQGTFTSDYSKYLDXQAAREFIKWLLNT

SEQ ID NO: 544 - protein, 29 aa, synthetic construct
  REGION 1..29: note = Description of Artificial Sequence: Synthetic peptide
  MOD_RES 16: note = Aib
  MOD_RES 24: note = Lys(C18)
  REGION 1..29: note = C-term amide
HGQGTFTSDYSKYLDXQAAREFIKWLLNT

SEQ ID NO: 545 - protein, 29 aa, synthetic construct
  REGION 1..29: note = Description of Artificial Sequence: Synthetic peptide
  MOD_RES 16: note = Aib
  MOD_RES 24: note = Lys(C20)
  REGION 1..29: note = C-term amide
HGQGTFTSDYSKYLDXQAAREFIKWLLNT

SEQ ID NO: 546 - protein, 29 aa, synthetic construct
  REGION 1..29: note = Description of Artificial Sequence: Synthetic peptide
  MOD_RES 16: note = Aib
  MOD_RES 24: note = Lys(C8)
  REGION 1..29: note = C-term amide
HGQGTFTSDYSKYLDXRRAQDFVKWLLNT

SEQ ID NO: 547 - protein, 29 aa, synthetic construct
  REGION 1..29: note = Description of Artificial Sequence: Synthetic peptide
  MOD_RES 16: note = Aib
  MOD_RES 24: note = Lys(C12)
  REGION 1..29: note = C-term amide
HGQGTFTSDYSKYLDXRRAQDFVKWLLNT

SEQ ID NO: 548 - protein, 29 aa, synthetic construct
  REGION 1..29: note = Description of Artificial Sequence: Synthetic peptide
  MOD_RES 16: note = Aib
  MOD_RES 24: note = Lys(C14)
  REGION 1..29: note = C-term amide
HGQGTFTSDYSKYLDXRRAQDFVKWLLNT

SEQ ID NO: 549 - protein, 29 aa, synthetic construct
  REGION 1..29: note = Description of Artificial Sequence: Synthetic peptide
  MOD_RES 16: note = Aib
  MOD_RES 24: note = Lys(C16)
  REGION 1..29: note = C-term amide
HGQGTFTSDYSKYLDXRRAQDFVKWLLNT

SEQ ID NO: 550 - protein, 29 aa, synthetic construct
  REGION 1..29: note = Description of Artificial Sequence: Synthetic peptide
  MOD_RES 16: note = Aib
  MOD_RES 24: note = Lys(C18)
  REGION 1..29: note = C-term amide
HGQGTFTSDYSKYLDXRRAQDFVKWLLNT

SEQ ID NO: 551 - protein, 29 aa, synthetic construct
  REGION 1..29: note = Description of Artificial Sequence: Synthetic peptide
  MOD_RES 16: note = Aib
  MOD_RES 24: note = Lys(C20)
  REGION 1..29: note = C-term amide
HGQGTFTSDYSKYLDXRRAQDFVKWLLNT

SEQ ID NO: 552 - protein, 29 aa, synthetic construct
  REGION 1..29: note = Description of Artificial Sequence: Synthetic peptide
  MOD_RES 24: note = Lys(C8)
  REGION 1..29: note = C-term amide
HGQGTFTSDYSKYLDEQAAREFIKWLLQT

SEQ ID NO: 553 - protein, 29 aa, synthetic construct
  REGION 1..29: note = Description of Artificial Sequence: Synthetic peptide
  MOD_RES 24: note = Lys(C12)
  REGION 1..29: note = C-term amide
HGQGTFTSDYSKYLDEQAAREFIKWLLQT

SEQ ID NO: 554 - protein, 29 aa, synthetic construct
  REGION 1..29: note = Description of Artificial Sequence: Synthetic peptide
  MOD_RES 24: note = Lys(C14)
  REGION 1..29: note = C-term amide
HGQGTFTSDYSKYLDEQAAREFIKWLLQT

SEQ ID NO: 555 - protein, 29 aa, synthetic construct
  REGION 1..29: note = Description of Artificial Sequence: Synthetic peptide
  MOD_RES 24: note = Lys(C16)
  REGION 1..29: note = C-term amide
HGQGTFTSDYSKYLDEQAAREFIKWLLQT

SEQ ID NO: 556 - protein, 29 aa, synthetic construct
  REGION 1..29: note = Description of Artificial Sequence: Synthetic peptide
  MOD_RES 24: note = Lys(C18)
  REGION 1..29: note = C-term amide
HGQGTFTSDYSKYLDEQAAREFIKWLLQT

SEQ ID NO: 557 - protein, 29 aa, synthetic construct
  REGION 1..29: note = Description of Artificial Sequence: Synthetic peptide
  MOD_RES 24: note = Lys(C20)
  REGION 1..29: note = C-term amide
HGQGTFTSDYSKYLDEQAAREFIKWLLQT

SEQ ID NO: 558 - protein, 29 aa, synthetic construct
  REGION 1..29: note = Description of Artificial Sequence: Synthetic peptide
  MOD_RES 17: note = Lys(C8)
  REGION 1..29: note = C-term amide
HGQGTFTSDYSKYLDEKAAREFIAWLLQT

SEQ ID NO: 559 - protein, 29 aa, synthetic construct
  REGION 1..29: note = Description of Artificial Sequence: Synthetic peptide
  MOD_RES 17: note = Lys(C12)
  REGION 1..29: note = C-term amide
HGQGTFTSDYSKYLDEKAAREFIAWLLQT

SEQ ID NO: 560 - protein, 29 aa, synthetic construct
  REGION 1..29: note = Description of Artificial Sequence: Synthetic peptide
  MOD_RES 17: note = Lys(C14)
  REGION 1..29: note = C-term amide
HGQGTFTSDYSKYLDEKAAREFIAWLLQT

SEQ ID NO: 561 - protein, 29 aa, synthetic construct
  REGION 1..29: note = Description of Artificial Sequence: Synthetic peptide
  MOD_RES 17: note = Lys(C16)
  REGION 1..29: note = C-term amide
HGQGTFTSDYSKYLDEKAAREFIAWLLQT

SEQ ID NO: 562 - protein, 29 aa, synthetic construct
  REGION 1..29: note = Description of Artificial Sequence: Synthetic peptide
  MOD_RES 17: note = Lys(C18)
  REGION 1..29: note = C-term amide
HGQGTFTSDYSKYLDEKAAREFIAWLLQT

SEQ ID NO: 563 - protein, 29 aa, synthetic construct
  REGION 1..29: note = Description of Artificial Sequence: Synthetic peptide
  MOD_RES 17: note = Lys(C20)
  REGION 1..29: note = C-term amide
HGQGTFTSDYSKYLDEKAAREFIAWLLQT

SEQ ID NO: 564 - protein, 29 aa, synthetic construct
  REGION 1..29: note = Description of Artificial Sequence: Synthetic peptide
  MOD_RES 17: note = Lys(C8)
  REGION 1..29: note = C-term amide
HGQGTFTSDYSKYLDEKAAKEFIAWLLQT

SEQ ID NO: 565 - protein, 29 aa, synthetic construct
  REGION 1..29: note = Description of Artificial Sequence: Synthetic peptide
  MOD_RES 17: note = Lys(C12)
  REGION 1..29: note = C-term amide
HGQGTFTSDYSKYLDEKAAKEFIAWLLQT

SEQ ID NO: 566 - protein, 29 aa, synthetic construct
  REGION 1..29: note = Description of Artificial Sequence: Synthetic peptide
  MOD_RES 17: note = Lys(C14)
  REGION 1..29: note = C-term amide
HGQGTFTSDYSKYLDEKAAKEFIAWLLQT

SEQ ID NO: 567 - protein, 29 aa, synthetic construct
  REGION 1..29: note = Description of Artificial Sequence: Synthetic peptide
  MOD_RES 17: note = Lys(C16)
  REGION 1..29: note = C-term amide
HGQGTFTSDYSKYLDEKAAKEFIAWLLQT

SEQ ID NO: 568 - protein, 29 aa, synthetic construct
  REGION 1..29: note = Description of Artificial Sequence: Synthetic peptide
  MOD_RES 17: note = Lys(C18)
  REGION 1..29: note = C-term amide
HGQGTFTSDYSKYLDEKAAKEFIAWLLQT

SEQ ID NO: 569 - protein, 29 aa, synthetic construct
  REGION 1..29: note = Description of Artificial Sequence: Synthetic peptide
  MOD_RES 17: note = Lys(C20)
  REGION 1..29: note = C-term amide
HGQGTFTSDYSKYLDEKAAKEFIAWLLQT

SEQ ID NO: 570 - protein, 29 aa, synthetic construct
  REGION 1..29: note = Description of Artificial Sequence: Synthetic peptide
  MOD_RES 2: note = Aib
  MOD_RES 17: note = Lys(C8)
  REGION 1..29: note = C-term amide
HXQGTFTSDYSKYLDEKAAKEFIAWLLQT

SEQ ID NO: 571 - protein, 29 aa, synthetic construct
  REGION 1..29: note = Description of Artificial Sequence: Synthetic peptide
  MOD_RES 2: note = Aib
  MOD_RES 17: note = Lys(C12)
  REGION 1..29: note = C-term amide
HXQGTFTSDYSKYLDEKAAKEFIAWLLQT

SEQ ID NO: 572 - protein, 29 aa, synthetic construct
  REGION 1..29: note = Description of Artificial Sequence: Synthetic peptide
  MOD_RES 2: note = Aib
  MOD_RES 17: note = Lys(C14)
  REGION 1..29: note = C-term amide
HXQGTFTSDYSKYLDEKAAKEFIAWLLQT

SEQ ID NO: 573 - protein, 29 aa, synthetic construct
  REGION 1..29: note = Description of Artificial Sequence: Synthetic peptide
  MOD_RES 2: note = Aib
  MOD_RES 17: note = Lys(C16)
  REGION 1..29: note = C-term amide
HXQGTFTSDYSKYLDEKAAKEFIAWLLQT

SEQ ID NO: 574 - protein, 29 aa, synthetic construct
  REGION 1..29: note = Description of Artificial Sequence: Synthetic peptide
  MOD_RES 2: note = Aib
  MOD_RES 17: note = Lys(C18)
  REGION 1..29: note = C-term amide
HXQGTFTSDYSKYLDEKAAKEFIAWLLQT

SEQ ID NO: 575 - protein, 29 aa, synthetic construct
  REGION 1..29: note = Description of Artificial Sequence: Synthetic peptide
  MOD_RES 2: note = Aib
  MOD_RES 17: note = Lys(C20)
  REGION 1..29: note = C-term amide
HXQGTFTSDYSKYLDEKAAKEFIAWLLQT

SEQ ID NO: 576 - protein, 29 aa, synthetic construct
  REGION 1..29: note = Description of Artificial Sequence: Synthetic peptide
  MOD_RES 2: note = Aib
  MOD_RES 16: note = Aib
  MOD_RES 17: note = Lys(C8)
  REGION 1..29: note = C-term amide
HXQGTFTSDYSKYLDXKAAREFIAWLLQT

SEQ ID NO: 577 - protein, 29 aa, synthetic construct
  REGION 1..29: note = Description of Artificial Sequence: Synthetic peptide
  MOD_RES 2: note = Aib
  MOD_RES 16: note = Aib
  MOD_RES 17: note = Lys(C12)
  REGION 1..29: note = C-term amide
HXQGTFTSDYSKYLDXKAAREFIAWLLQT

SEQ ID NO: 578 - protein, 29 aa, synthetic construct
  REGION 1..29: note = Description of Artificial Sequence: Synthetic peptide
  MOD_RES 2: note = Aib
  MOD_RES 16: note = Aib
  MOD_RES 17: note = Lys(C14)
  REGION 1..29: note = C-term amide
HXQGTFTSDYSKYLDXKAAREFIAWLLQT

SEQ ID NO: 579 - protein, 29 aa, synthetic construct
  REGION 1..29: note = Description of Artificial Sequence: Synthetic peptide
  MOD_RES 2: note = Aib
  MOD_RES 16: note = Aib
  MOD_RES 17: note = Lys(C16)
  REGION 1..29: note = C-term amide
HXQGTFTSDYSKYLDXKAAREFIAWLLQT

SEQ ID NO: 580 - protein, 29 aa, synthetic construct
  REGION 1..29: note = Description of Artificial Sequence: Synthetic peptide
  MOD_RES 2: note = Aib
  MOD_RES 16: note = Aib
  MOD_RES 17: note = Lys(C18)
  REGION 1..29: note = C-term amide
HXQGTFTSDYSKYLDXKAAREFIAWLLQT

SEQ ID NO: 581 - protein, 29 aa, synthetic construct
  REGION 1..29: note = Description of Artificial Sequence: Synthetic peptide
  MOD_RES 2: note = Aib
  MOD_RES 16: note = Aib
  MOD_RES 17: note = Lys(C20)
  REGION 1..29: note = C-term amide
HXQGTFTSDYSKYLDXKAAREFIAWLLQT

SEQ ID NO: 582 - protein, 29 aa, synthetic construct
  REGION 1..29: note = Description of Artificial Sequence: Synthetic peptide
  MOD_RES 20: note = Lys(C8)
  REGION 1..29: note = C-term amide
HGQGTFTSDYSKYLDERRAKDFVQWLLQT

SEQ ID NO: 583 - protein, 29 aa, synthetic construct
  REGION 1..29: note = Description of Artificial Sequence: Synthetic peptide
  MOD_RES 20: note = Lys(C12)
  REGION 1..29: note = C-term amide
HGQGTFTSDYSKYLDERRAKDFVQWLLQT

SEQ ID NO: 584 - protein, 29 aa, synthetic construct
  REGION 1..29: note = Description of Artificial Sequence: Synthetic peptide
  MOD_RES 20: note = Lys(C14)
  REGION 1..29: note = C-term amide
HGQGTFTSDYSKYLDERRAKDFVQWLLQT

SEQ ID NO: 585 - protein, 29 aa, synthetic construct
  REGION 1..29: note = Description of Artificial Sequence: Synthetic peptide
  MOD_RES 20: note = Lys(C16)
  REGION 1..29: note = C-term amide
HGQGTFTSDYSKYLDERRAKDFVQWLLQT

SEQ ID NO: 586 - protein, 29 aa, synthetic construct
  REGION 1..29: note = Description of Artificial Sequence: Synthetic peptide
  MOD_RES 20: note = Lys(C18)
  REGION 1..29: note = C-term amide
HGQGTFTSDYSKYLDERRAKDFVQWLLQT

SEQ ID NO: 587 - protein, 29 aa, synthetic construct
  REGION 1..29: note = Description of Artificial Sequence: Synthetic peptide
  MOD_RES 20: note = Lys(C20)
  REGION 1..29: note = C-term amide
HGQGTFTSDYSKYLDERRAKDFVQWLLQT

SEQ ID NO: 588 - protein, 29 aa, synthetic construct
  REGION 1..29: note = Description of Artificial Sequence: Synthetic peptide
  MOD_RES 2: note = Aib
  MOD_RES 20: note = Lys(C8)
  REGION 1..29: note = C-term amide
HXQGTFTSDYSKYLDERRAKDFVQWLLQT

SEQ ID NO: 589 - protein, 29 aa, synthetic construct
  REGION 1..29: note = Description of Artificial Sequence: Synthetic peptide
  MOD_RES 2: note = Aib
  MOD_RES 20: note = Lys(C12)
  REGION 1..29: note = C-term amide
HXQGTFTSDYSKYLDERRAKDFVQWLLQT

SEQ ID NO: 590 - protein, 29 aa, synthetic construct
  REGION 1..29: note = Description of Artificial Sequence: Synthetic peptide
  MOD_RES 2: note = Aib
  MOD_RES 20: note = Lys(C14)
  REGION 1..29: note = C-term amide
HXQGTFTSDYSKYLDERRAKDFVQWLLQT

SEQ ID NO: 591 - protein, 29 aa, synthetic construct
  REGION 1..29: note = Description of Artificial Sequence: Synthetic peptide
  MOD_RES 2: note = Aib
  MOD_RES 20: note = Lys(C16)
  REGION 1..29: note = C-term amide
HXQGTFTSDYSKYLDERRAKDFVQWLLQT

SEQ ID NO: 592 - protein, 29 aa, synthetic construct
  REGION 1..29: note = Description of Artificial Sequence: Synthetic peptide
  MOD_RES 2: note = Aib
  MOD_RES 20: note = Lys(C18)
  REGION 1..29: note = C-term amide
HXQGTFTSDYSKYLDERRAKDFVQWLLQT

SEQ ID NO: 593 - protein, 29 aa, synthetic construct
  REGION 1..29: note = Description of Artificial Sequence: Synthetic peptide
  MOD_RES 2: note = Aib
  MOD_RES 20: note = Lys(C20)
  REGION 1..29: note = C-term amide
HXQGTFTSDYSKYLDERRAKDFVQWLLQT

SEQ ID NO: 594 - protein, 29 aa, synthetic construct
  REGION 1..29: note = Description of Artificial Sequence: Synthetic peptide
  MOD_RES 2: note = Aib
  REGION 16..20: note = misc_feature - Cyclic
  MOD_RES 16: note = Glu is cyclized through side chain to form a lactam linkage
  MOD_RES 20: note = Lys is cyclized through side chain to form a lactam linkage
  MOD_RES 24: note = Lys(C8)
  REGION 1..29: note = C-term amide
HXQGTFTSDYSKYLDEQAAKEFIKWLMQT

SEQ ID NO: 595 - protein, 29 aa, synthetic construct
  REGION 1..29: note = Description of Artificial Sequence: Synthetic peptide
  MOD_RES 2: note = Aib
  REGION 16..20: note = misc_feature - Cyclic
  MOD_RES 16: note = Glu is cyclized through side chain to form a lactam linkage
  MOD_RES 20: note = Lys is cyclized through side chain to form a lactam linkage
  MOD_RES 24: note = Lys(C12)
  REGION 1..29: note = C-term amide
HXQGTFTSDYSKYLDEQAAKEFIKWLMQT

SEQ ID NO: 596 - protein, 29 aa, synthetic construct
  REGION 1..29: note = Description of Artificial Sequence: Synthetic peptide
  MOD_RES 2: note = Aib
  REGION 16..20: note = misc_feature - Cyclic
  MOD_RES 16: note = Glu is cyclized through side chain to form a lactam linkage
  MOD_RES 20: note = Lys is cyclized through side chain to form a lactam linkage
  MOD_RES 24: note = Lys(C14)
  REGION 1..29: note = C-term amide
HXQGTFTSDYSKYLDEQAAKEFIKWLMQT

SEQ ID NO: 597 - protein, 29 aa, synthetic construct
  REGION 1..29: note = Description of Artificial Sequence: Synthetic peptide
  MOD_RES 2: note = Aib
  REGION 16..20: note = misc_feature - Cyclic
  MOD_RES 16: note = Glu is cyclized through side chain to form a lactam linkage
  MOD_RES 20: note = Lys is cyclized through side chain to form a lactam linkage
  MOD_RES 24: note = Lys(C16)
  REGION 1..29: note = C-term amide
HXQGTFTSDYSKYLDEQAAKEFIKWLMQT

SEQ ID NO: 598 - protein, 29 aa, synthetic construct
  REGION 1..29: note = Description of Artificial Sequence: Synthetic peptide
  MOD_RES 2: note = Aib
  REGION 16..20: note = misc_feature - Cyclic
  MOD_RES 16: note = Glu is cyclized through side chain to form a lactam linkage
  MOD_RES 20: note = Lys is cyclized through side chain to form a lactam linkage
  MOD_RES 24: note = Lys(C18)
  REGION 1..29: note = C-term amide
HXQGTFTSDYSKYLDEQAAKEFIKWLMQT

SEQ ID NO: 599 - protein, 29 aa, synthetic construct
  REGION 1..29: note = Description of Artificial Sequence: Synthetic peptide
  MOD_RES 2: note = Aib
  REGION 16..20: note = misc_feature - Cyclic
  MOD_RES 16: note = Glu is cyclized through side chain to form a lactam linkage
  MOD_RES 20: note = Lys is cyclized through side chain to form a lactam linkage
  MOD_RES 24: note = Lys(C20)
  REGION 1..29: note = C-term amide
HXQGTFTSDYSKYLDEQAAKEFIKWLMQT

SEQ ID NO: 600 - protein, 29 aa, synthetic construct
  REGION 1..29: note = Description of Artificial Sequence: Synthetic peptide
  MOD_RES 2: note = Aib
  REGION 16..20: note = misc_feature - Cyclic
  MOD_RES 16: note = Glu is cyclized through side chain to form a lactam linkage
  MOD_RES 20: note = Lys is cyclized through side chain to form a lactam linkage
  MOD_RES 24: note = Lys(C8)
  REGION 1..29: note = C-term amide
HXQGTFTSDYSKYLDEQAAKEFIKWLLQT

SEQ ID NO: 601 - protein, 29 aa, synthetic construct
  REGION 1..29: note = Description of Artificial Sequence: Synthetic peptide
  MOD_RES 2: note = Aib
  REGION 16..20: note = misc_feature - Cyclic
  MOD_RES 16: note = Glu is cyclized through side chain to form a lactam linkage
  MOD_RES 20: note = Lys is cyclized through side chain to form a lactam linkage
  MOD_RES 24: note = Lys(C12)
  REGION 1..29: note = C-term amide
HXQGTFTSDYSKYLDEQAAKEFIKWLLQT

SEQ ID NO: 602 - protein, 29 aa, synthetic construct
  REGION 1..29: note = Description of Artificial Sequence: Synthetic peptide
  MOD_RES 2: note = Aib
  REGION 16..20: note = misc_feature - Cyclic
  MOD_RES 16: note = Glu is cyclized through side chain to form a lactam linkage
  MOD_RES 20: note = Lys is cyclized through side chain to form a lactam linkage
  MOD_RES 24: note = Lys(C14)
  REGION 1..29: note = C-term amide
HXQGTFTSDYSKYLDEQAAKEFIKWLLQT

SEQ ID NO: 603 - protein, 29 aa, synthetic construct
  REGION 1..29: note = Description of Artificial Sequence: Synthetic peptide
  MOD_RES 2: note = Aib
  REGION 16..20: note = misc_feature - Cyclic
  MOD_RES 16: note = Glu is cyclized through side chain to form a lactam linkage
  MOD_RES 20: note = Lys is cyclized through side chain to form a lactam linkage
  MOD_RES 24: note = Lys(C16)
  REGION 1..29: note = C-term amide
HXQGTFTSDYSKYLDEQAAKEFIKWLLQT

SEQ ID NO: 604 - protein, 29 aa, synthetic construct
  REGION 1..29: note = Description of Artificial Sequence: Synthetic peptide
  MOD_RES 2: note = Aib
  REGION 16..20: note = misc_feature - Cyclic
  MOD_RES 16: note = Glu is cyclized through side chain to form a lactam linkage
  MOD_RES 20: note = Lys is cyclized through side chain to form a lactam linkage
  MOD_RES 24: note = Lys(C18)
  REGION 1..29: note = C-term amide
HXQGTFTSDYSKYLDEQAAKEFIKWLLQT

SEQ ID NO: 605 - protein, 29 aa, synthetic construct
  REGION 1..29: note = Description of Artificial Sequence: Synthetic peptide
  MOD_RES 2: note = Aib
  REGION 16..20: note = misc_feature - Cyclic
  MOD_RES 16: note = Glu is cyclized through side chain to form a lactam linkage
  MOD_RES 20: note = Lys is cyclized through side chain to form a lactam linkage
  MOD_RES 24: note = Lys(C20)
  REGION 1..29: note = C-term amide
HXQGTFTSDYSKYLDEQAAKEFIKWLLQT

SEQ ID NO: 606 - protein, 29 aa, synthetic construct
  REGION 1..29: note = Description of Artificial Sequence: Synthetic peptide
  MOD_RES 2: note = Aib
  REGION 16..20: note = misc_feature - Cyclic
  MOD_RES 16: note = Glu is cyclized through side chain to form a lactam linkage
  MOD_RES 20: note = Lys is cyclized through side chain to form a lactam linkage
  MOD_RES 24: note = Lys(M8)
  REGION 1..29: note = C-term amide
HXQGTFTSDYSKYLDEQAAKEFIKWLLQT

SEQ ID NO: 607 - protein, 29 aa, synthetic construct
  REGION 1..29: note = Description of Artificial Sequence: Synthetic peptide
  MOD_RES 2: note = Aib
  REGION 16..20: note = misc_feature - Cyclic
  MOD_RES 16: note = Glu is cyclized through side chain to form a lactam linkage
  MOD_RES 20: note = Lys is cyclized through side chain to form a lactam linkage
  MOD_RES 24: note = Lys(M12)
  REGION 1..29: note = C-term amide
HXQGTFTSDYSKYLDEQAAKEFIKWLLQT

SEQ ID NO: 608 - protein, 29 aa, synthetic construct
  REGION 1..29: note = Description of Artificial Sequence: Synthetic peptide
  MOD_RES 2: note = Aib
  REGION 16..20: note = misc_feature - Cyclic
  MOD_RES 16: note = Glu is cyclized through side chain to form a lactam linkage
  MOD_RES 20: note = Lys is cyclized through side chain to form a lactam linkage
  MOD_RES 24: note = Lys(M14)
  REGION 1..29: note = C-term amide
HXQGTFTSDYSKYLDEQAAKEFIKWLLQT

SEQ ID NO: 609 - protein, 29 aa, synthetic construct
  REGION 1..29: note = Description of Artificial Sequence: Synthetic peptide
  MOD_RES 2: note = Aib
  REGION 16..20: note = misc_feature - Cyclic
  MOD_RES 16: note = Glu is cyclized through side chain to form a lactam linkage
  MOD_RES 20: note = Lys is cyclized through side chain to form a lactam linkage
  MOD_RES 24: note = Lys(M16)
  REGION 1..29: note = C-term amide
HXQGTFTSDYSKYLDEQAAKEFIKWLLQT

SEQ ID NO: 610 - protein, 29 aa, synthetic construct
  REGION 1..29: note = Description of Artificial Sequence: Synthetic peptide
  MOD_RES 2: note = Aib
  REGION 16..20: note = misc_feature - Cyclic
  MOD_RES 16: note = Glu is cyclized through side chain to form a lactam linkage
  MOD_RES 20: note = Lys is cyclized through side chain to form a lactam linkage
  MOD_RES 24: note = Lys(M18)
  REGION 1..29: note = C-term amide
HXQGTFTSDYSKYLDEQAAKEFIKWLLQT

SEQ ID NO: 611 - protein, 29 aa, synthetic construct
  REGION 1..29: note = Description of Artificial Sequence: Synthetic peptide
  MOD_RES 2: note = Aib
  REGION 16..20: note = misc_feature - Cyclic
  MOD_RES 16: note = Glu is cyclized through side chain to form a lactam linkage
  MOD_RES 20: note = Lys is cyclized through side chain to form a lactam linkage
  MOD_RES 24: note = Lys(M20)
  REGION 1..29: note = C-term amide
HXQGTFTSDYSKYLDEQAAKEFIKWLLQT

SEQ ID NO: 612 - protein, 29 aa, synthetic construct
  REGION 1..29: note = Description of Artificial Sequence: Synthetic peptide
  MOD_RES 24: note = Lys(M8)
  REGION 1..29: note = C-term amide
HGQGTFTSDYSKYLDEQAAREFIKWLLQT

SEQ ID NO: 613 - protein, 29 aa, synthetic construct
  REGION 1..29: note = Description of Artificial Sequence: Synthetic peptide
  MOD_RES 24: note = Lys(M12)
  REGION 1..29: note = C-term amide
HGQGTFTSDYSKYLDEQAAREFIKWLLQT

SEQ ID NO: 614 - protein, 29 aa, synthetic construct
  REGION 1..29: note = Description of Artificial Sequence: Synthetic peptide
  MOD_RES 24: note = Lys(M14)
  REGION 1..29: note = C-term amide
HGQGTFTSDYSKYLDEQAAREFIKWLLQT

SEQ ID NO: 615 - protein, 29 aa, synthetic construct
  REGION 1..29: note = Description of Artificial Sequence: Synthetic peptide
  MOD_RES 24: note = Lys(M16)
  REGION 1..29: note = C-term amide
HGQGTFTSDYSKYLDEQAAREFIKWLLQT

SEQ ID NO: 616 - protein, 29 aa, synthetic construct
  REGION 1..29: note = Description of Artificial Sequence: Synthetic peptide
  MOD_RES 24: note = Lys(M18)
  REGION 1..29: note = C-term amide
HGQGTFTSDYSKYLDEQAAREFIKWLLQT

SEQ ID NO: 617 - protein, 29 aa, synthetic construct
  REGION 1..29: note = Description of Artificial Sequence: Synthetic peptide
  MOD_RES 24: note = Lys(M20)
  REGION 1..29: note = C-term amide
HGQGTFTSDYSKYLDEQAAREFIKWLLQT

SEQ ID NO: 618 - protein, 29 aa, synthetic construct
  REGION 1..29: note = Description of Artificial Sequence: Synthetic peptide
  MOD_RES 17: note = Lys(M8)
  REGION 1..29: note = C-term amide
HGQGTFTSDYSKYLDEKAAKEFIAWLLNT

SEQ ID NO: 619 - protein, 29 aa, synthetic construct
  REGION 1..29: note = Description of Artificial Sequence: Synthetic peptide
  MOD_RES 17: note = Lys(M12)
  REGION 1..29: note = C-term amide
HGQGTFTSDYSKYLDEKAAKEFIAWLLNT

SEQ ID NO: 620 - protein, 29 aa, synthetic construct
  REGION 1..29: note = Description of Artificial Sequence: Synthetic peptide
  MOD_RES 17: note = Lys(M14)
  REGION 1..29: note = C-term amide
HGQGTFTSDYSKYLDEKAAKEFIAWLLNT

SEQ ID NO: 621 - protein, 29 aa, synthetic construct
  REGION 1..29: note = Description of Artificial Sequence: Synthetic peptide
  MOD_RES 17: note = Lys(M16)
  REGION 1..29: note = C-term amide
HGQGTFTSDYSKYLDEKAAKEFIAWLLNT

SEQ ID NO: 622 - protein, 29 aa, synthetic construct
  REGION 1..29: note = Description of Artificial Sequence: Synthetic peptide
  MOD_RES 17: note = Lys(M18)
  REGION 1..29: note = C-term amide
HGQGTFTSDYSKYLDEKAAKEFIAWLLNT

SEQ ID NO: 623 - protein, 29 aa, synthetic construct
  REGION 1..29: note = Description of Artificial Sequence: Synthetic peptide
  MOD_RES 17: note = Lys(M20)
  REGION 1..29: note = C-term amide
HGQGTFTSDYSKYLDEKAAKEFIAWLLNT

SEQ ID NO: 624 - protein, 29 aa, synthetic construct
  REGION 1..29: note = Description of Artificial Sequence: Synthetic peptide
  MOD_RES 17: note = Lys(M8)
  REGION 1..29: note = C-term amide
HGQGTFTSDYSKYLDEKAAREFIAWLLQT

SEQ ID NO: 625 - protein, 29 aa, synthetic construct
  REGION 1..29: note = Description of Artificial Sequence: Synthetic peptide
  MOD_RES 17: note = Lys(M12)
  REGION 1..29: note = C-term amide
HGQGTFTSDYSKYLDEKAAREFIAWLLQT

SEQ ID NO: 626 - protein, 29 aa, synthetic construct
  REGION 1..29: note = Description of Artificial Sequence: Synthetic peptide
  MOD_RES 17: note = Lys(M14)
  REGION 1..29: note = C-term amide
HGQGTFTSDYSKYLDEKAAREFIAWLLQT

SEQ ID NO: 627 - protein, 29 aa, synthetic construct
  REGION 1..29: note = Description of Artificial Sequence: Synthetic peptide
  MOD_RES 17: note = Lys(M16)
  REGION 1..29: note = C-term amide
HGQGTFTSDYSKYLDEKAAREFIAWLLQT

SEQ ID NO: 628 - protein, 29 aa, synthetic construct
  REGION 1..29: note = Description of Artificial Sequence: Synthetic peptide
  MOD_RES 17: note = Lys(M18)
  REGION 1..29: note = C-term amide
HGQGTFTSDYSKYLDEKAAREFIAWLLQT

SEQ ID NO: 629 - protein, 29 aa, synthetic construct
  REGION 1..29: note = Description of Artificial Sequence: Synthetic peptide
  MOD_RES 17: note = Lys(M20)
  REGION 1..29: note = C-term amide
HGQGTFTSDYSKYLDEKAAREFIAWLLQT

SEQ ID NO: 630 - protein, 29 aa, synthetic construct
  REGION 1..29: note = Description of Artificial Sequence: Synthetic peptide
  MOD_RES 2: note = Aib
  REGION 16..20: note = misc_feature - Cyclic
  MOD_RES 16: note = Glu is cyclized through side chain to form a lactam linkage
  MOD_RES 20: note = Lys is cyclized through side chain to form a lactam linkage
  MOD_RES 24: note = Lys(Me8)
  REGION 1..29: note = C-term amide
HXQGTFTSDYSKYLDEQAAKEFIKWLLQT

SEQ ID NO: 631 - protein, 29 aa, synthetic construct
  REGION 1..29: note = Description of Artificial Sequence: Synthetic peptide
  MOD_RES 2: note = Aib
  REGION 16..20: note = misc_feature - Cyclic
  MOD_RES 16: note = Glu is cyclized through side chain to form a lactam linkage
  MOD_RES 20: note = Lys is cyclized through side chain to form a lactam linkage
  MOD_RES 24: note = Lys(Me12)
  REGION 1..29: note = C-term amide
HXQGTFTSDYSKYLDEQAAKEFIKWLLQT

SEQ ID NO: 632 - protein, 29 aa, synthetic construct
  REGION 1..29: note = Description of Artificial Sequence: Synthetic peptide
  MOD_RES 2: note = Aib
  REGION 16..20: note = misc_feature - Cyclic
  MOD_RES 16: note = Glu is cyclized through side chain to form a lactam linkage
  MOD_RES 20: note = Lys is cyclized through side chain to form a lactam linkage
  MOD_RES 24: note = Lys(Me14)
  REGION 1..29: note = C-term amide
HXQGTFTSDYSKYLDEQAAKEFIKWLLQT

SEQ ID NO: 633 - protein, 29 aa, synthetic construct
  REGION 1..29: note = Description of Artificial Sequence: Synthetic peptide
  MOD_RES 2: note = Aib
  REGION 16..20: note = misc_feature - Cyclic
  MOD_RES 16: note = Glu is cyclized through side chain to form a lactam linkage
  MOD_RES 20: note = Lys is cyclized through side chain to form a lactam linkage
  MOD_RES 24: note = Lys(Me16)
  REGION 1..29: note = C-term amide
HXQGTFTSDYSKYLDEQAAKEFIKWLLQT

SEQ ID NO: 634 - protein, 29 aa, synthetic construct
  REGION 1..29: note = Description of Artificial Sequence: Synthetic peptide
  MOD_RES 2: note = Aib
  REGION 16..20: note = misc_feature - Cyclic
  MOD_RES 16: note = Glu is cyclized through side chain to form a lactam linkage
  MOD_RES 20: note = Lys is cyclized through side chain to form a lactam linkage
  MOD_RES 24: note = Lys(Me18)
  REGION 1..29: note = C-term amide
HXQGTFTSDYSKYLDEQAAKEFIKWLLQT

SEQ ID NO: 635 - protein, 29 aa, synthetic construct
  REGION 1..29: note = Description of Artificial Sequence: Synthetic peptide
  MOD_RES 2: note = Aib
  REGION 16..20: note = misc_feature - Cyclic
  MOD_RES 16: note = Glu is cyclized through side chain to form a lactam linkage
  MOD_RES 20: note = Lys is cyclized through side chain to form a lactam linkage
  MOD_RES 24: note = Lys(Me20)
  REGION 1..29: note = C-term amide
HXQGTFTSDYSKYLDEQAAKEFIKWLLQT

SEQ ID NO: 636 - protein, 29 aa, synthetic construct
  REGION 1..29: note = Description of Artificial Sequence: Synthetic peptide
  MOD_RES 24: note = Lys(Me8)
  REGION 1..29: note = C-term amide
HGQGTFTSDYSKYLDEQAAREFIKWLLQT

SEQ ID NO: 637 - protein, 29 aa, synthetic construct
  REGION 1..29: note = Description of Artificial Sequence: Synthetic peptide
  MOD_RES 24: note = Lys(Me12)
  REGION 1..29: note = C-term amide
HGQGTFTSDYSKYLDEQAAREFIKWLLQT

SEQ ID NO: 638 - protein, 29 aa, synthetic construct
  REGION 1..29: note = Description of Artificial Sequence: Synthetic peptide
  MOD_RES 24: note = Lys(Me14)
  REGION 1..29: note = C-term amide
HGQGTFTSDYSKYLDEQAAREFIKWLLQT

SEQ ID NO: 639 - protein, 29 aa, synthetic construct
  REGION 1..29: note = Description of Artificial Sequence: Synthetic peptide
  MOD_RES 24: note = Lys(Me16)
  REGION 1..29: note = C-term amide
HGQGTFTSDYSKYLDEQAAREFIKWLLQT

SEQ ID NO: 640 - protein, 29 aa, synthetic construct
  REGION 1..29: note = Description of Artificial Sequence: Synthetic peptide
  MOD_RES 24: note = Lys(Me18)
  REGION 1..29: note = C-term amide
HGQGTFTSDYSKYLDEQAAREFIKWLLQT

SEQ ID NO: 641 - protein, 29 aa, synthetic construct
  REGION 1..29: note = Description of Artificial Sequence: Synthetic peptide
  MOD_RES 24: note = Lys(Me20)
  REGION 1..29: note = C-term amide
HGQGTFTSDYSKYLDEQAAREFIKWLLQT

SEQ ID NO: 642 - protein, 29 aa, synthetic construct
  REGION 1..29: note = Description of Artificial Sequence: Synthetic peptide
  MOD_RES 17: note = Lys(Me8)
  REGION 1..29: note = C-term amide
HGQGTFTSDYSKYLDEKAAKEFIAWLLNT

SEQ ID NO: 643 - protein, 29 aa, synthetic construct
  REGION 1..29: note = Description of Artificial Sequence: Synthetic peptide
  MOD_RES 17: note = Lys(Me12)
  REGION 1..29: note = C-term amide
HGQGTFTSDYSKYLDEKAAKEFIAWLLNT

SEQ ID NO: 644 - protein, 29 aa, synthetic construct
  REGION 1..29: note = Description of Artificial Sequence: Synthetic peptide
  MOD_RES 17: note = Lys(Me14)
  REGION 1..29: note = C-term amide
HGQGTFTSDYSKYLDEKAAKEFIAWLLNT

SEQ ID NO: 645 - protein, 29 aa, synthetic construct
  REGION 1..29: note = Description of Artificial Sequence: Synthetic peptide
  MOD_RES 17: note = Lys(Me16)
  REGION 1..29: note = C-term amide
HGQGTFTSDYSKYLDEKAAKEFIAWLLNT

SEQ ID NO: 646 - protein, 29 aa, synthetic construct
  REGION 1..29: note = Description of Artificial Sequence: Synthetic peptide
  MOD_RES 17: note = Lys(Me18)
  REGION 1..29: note = C-term amide
HGQGTFTSDYSKYLDEKAAKEFIAWLLNT

SEQ ID NO: 647 - protein, 29 aa, synthetic construct
  REGION 1..29: note = Description of Artificial Sequence: Synthetic peptide
  MOD_RES 17: note = Lys(Me20)
  REGION 1..29: note = C-term amide
HGQGTFTSDYSKYLDEKAAKEFIAWLLNT

SEQ ID NO: 648 - protein, 29 aa, synthetic construct
  REGION 1..29: note = Description of Artificial Sequence: Synthetic peptide
  MOD_RES 17: note = Lys(Me8)
  REGION 1..29: note = C-term amide
HGQGTFTSDYSKYLDEKAAREFIAWLLQT

SEQ ID NO: 649 - protein, 29 aa, synthetic construct
  REGION 1..29: note = Description of Artificial Sequence: Synthetic peptide
  MOD_RES 17: note = Lys(Me12)
  REGION 1..29: note = C-term amide
HGQGTFTSDYSKYLDEKAAREFIAWLLQT

SEQ ID NO: 650 - protein, 29 aa, synthetic construct
  REGION 1..29: note = Description of Artificial Sequence: Synthetic peptide
  MOD_RES 17: note = Lys(Me14)
  REGION 1..29: note = C-term amide
HGQGTFTSDYSKYLDEKAAREFIAWLLQT

SEQ ID NO: 651 - protein, 29 aa, synthetic construct
  REGION 1..29: note = Description of Artificial Sequence: Synthetic peptide
  MOD_RES 17: note = Lys(Me16)
  REGION 1..29: note = C-term amide
HGQGTFTSDYSKYLDEKAAREFIAWLLQT

SEQ ID NO: 652 - protein, 29 aa, synthetic construct
  REGION 1..29: note = Description of Artificial Sequence: Synthetic peptide
  MOD_RES 17: note = Lys(Me18)
  REGION 1..29: note = C-term amide
HGQGTFTSDYSKYLDEKAAREFIAWLLQT

SEQ ID NO: 653 - protein, 29 aa, synthetic construct
  REGION 1..29: note = Description of Artificial Sequence: Synthetic peptide
  MOD_RES 17: note = Lys(Me20)
  REGION 1..29: note = C-term amide
HGQGTFTSDYSKYLDEKAAREFIAWLLQT

SEQ ID NO: 654 - protein, 11 aa, synthetic construct
  REGION 1..11: note = Description of Artificial Sequence: Synthetic peptide
  MOD_RES 2: note = Alpha-MePro
  MOD_RES 6: note = Alpha-MeF
  MOD_RES 10: note = EtBip
  MOD_RES 11: note = Lys(C8)
  REGION 1..11: note = C-term amide
HPQGTFTSDXK

SEQ ID NO: 655 - protein, 11 aa, synthetic construct
  REGION 1..11: note = Description of Artificial Sequence: Synthetic peptide
  MOD_RES 2: note = Alpha-MePro
  MOD_RES 6: note = Alpha-MeF
  MOD_RES 10: note = EtBip
  MOD_RES 11: note = Lys(C12)
  REGION 1..11: note = C-term amide
HPQGTFTSDXK

SEQ ID NO: 656 - protein, 11 aa, synthetic construct
  REGION 1..11: note = Description of Artificial Sequence: Synthetic peptide
  MOD_RES 2: note = Alpha-MePro
  MOD_RES 6: note = Alpha-MeF
  MOD_RES 10: note = EtBip
  MOD_RES 11: note = Lys(C14)
  REGION 1..11: note = C-term amide
HPQGTFTSDXK

SEQ ID NO: 657 - protein, 11 aa, synthetic construct
  REGION 1..11: note = Description of Artificial Sequence: Synthetic peptide
  MOD_RES 2: note = Alpha-MePro
  MOD_RES 6: note = Alpha-MeF
  MOD_RES 10: note = EtBip
  MOD_RES 11: note = Lys(C16)
  REGION 1..11: note = C-term amide
HPQGTFTSDXK

SEQ ID NO: 658 - protein, 11 aa, synthetic construct
  REGION 1..11: note = Description of Artificial Sequence: Synthetic peptide
  MOD_RES 2: note = Alpha-MePro
  MOD_RES 6: note = Alpha-MeF
  MOD_RES 10: note = EtBip
  MOD_RES 11: note = Lys(C18)
  REGION 1..11: note = C-term amide
HPQGTFTSDXK

SEQ ID NO: 659 - protein, 11 aa, synthetic construct
  REGION 1..11: note = Description of Artificial Sequence: Synthetic peptide
  MOD_RES 2: note = Alpha-MePro
  MOD_RES 6: note = Alpha-MeF
  MOD_RES 10: note = EtBip
  MOD_RES 11: note = Lys(C20)
  REGION 1..11: note = C-term amide
HPQGTFTSDXK

SEQ ID NO: 660 - protein, 11 aa, synthetic construct
  REGION 1..11: note = Description of Artificial Sequence: Synthetic peptide
  MOD_RES 2: note = Alpha-MePro
  MOD_RES 6: note = Alpha-MeFF
  MOD_RES 10: note = EtBip
  MOD_RES 11: note = Lys(C8)
  REGION 1..11: note = C-term amide
HPQGTFTSDXK

SEQ ID NO: 661 - protein, 11 aa, synthetic construct
  REGION 1..11: note = Description of Artificial Sequence: Synthetic peptide
  MOD_RES 2: note = Alpha-MePro
  MOD_RES 6: note = Alpha-MeFF
  MOD_RES 10: note = EtBip
  MOD_RES 11: note = Lys(C12)
  REGION 1..11: note = C-term amide
HPQGTFTSDXK

SEQ ID NO: 662 - protein, 11 aa, synthetic construct
  REGION 1..11: note = Description of Artificial Sequence: Synthetic peptide
  MOD_RES 2: note = Alpha-MePro
  MOD_RES 6: note = Alpha-MeFF
  MOD_RES 10: note = EtBip
  MOD_RES 11: note = Lys(C14)
  REGION 1..11: note = C-term amide
HPQGTFTSDXK

SEQ ID NO: 663 - protein, 11 aa, synthetic construct
  REGION 1..11: note = Description of Artificial Sequence: Synthetic peptide
  MOD_RES 2: note = Alpha-MePro
  MOD_RES 6: note = Alpha-MeFF
  MOD_RES 10: note = EtBip
  MOD_RES 11: note = Lys(C16)
  REGION 1..11: note = C-term amide
HPQGTFTSDXK

SEQ ID NO: 664 - protein, 11 aa, synthetic construct
  REGION 1..11: note = Description of Artificial Sequence: Synthetic peptide
  MOD_RES 2: note = Alpha-MePro
  MOD_RES 6: note = Alpha-MeFF
  MOD_RES 10: note = EtBip
  MOD_RES 11: note = Lys(C18)
  REGION 1..11: note = C-term amide
HPQGTFTSDXK

SEQ ID NO: 665 - protein, 11 aa, synthetic construct
  REGION 1..11: note = Description of Artificial Sequence: Synthetic peptide
  MOD_RES 2: note = Alpha-MePro
  MOD_RES 6: note = Alpha-MeFF
  MOD_RES 10: note = EtBip
  MOD_RES 11: note = Lys(C20)
  REGION 1..11: note = C-term amide
HPQGTFTSDXK

SEQ ID NO: 666 - protein, 11 aa, synthetic construct
  REGION 1..11: note = Description of Artificial Sequence: Synthetic peptide
  MOD_RES 2: note = Aib
  MOD_RES 6: note = Alpha-MeF
  MOD_RES 10: note = EtBip
  MOD_RES 11: note = Lys(C8)
  REGION 1..11: note = C-term amide
HXQGTFTSDXK

SEQ ID NO: 667 - protein, 11 aa, synthetic construct
  REGION 1..11: note = Description of Artificial Sequence: Synthetic peptide
  MOD_RES 2: note = Aib
  MOD_RES 6: note = Alpha-MeF
  MOD_RES 10: note = EtBip
  MOD_RES 11: note = Lys(C12)
  REGION 1..11: note = C-term amide
HXQGTFTSDXK

SEQ ID NO: 668 - protein, 11 aa, synthetic construct
  REGION 1..11: note = Description of Artificial Sequence: Synthetic peptide
  MOD_RES 2: note = Aib
  MOD_RES 6: note = Alpha-MeF
  MOD_RES 10: note = EtBip
  MOD_RES 11: note = Lys(C14)
  REGION 1..11: note = C-term amide
HXQGTFTSDXK

SEQ ID NO: 669 - protein, 11 aa, synthetic construct
  REGION 1..11: note = Description of Artificial Sequence: Synthetic peptide
  MOD_RES 2: note = Aib
  MOD_RES 6: note = Alpha-MeF
  MOD_RES 10: note = EtBip
  MOD_RES 11: note = Lys(C16)
  REGION 1..11: note = C-term amide
HXQGTFTSDXK

SEQ ID NO: 670 - protein, 11 aa, synthetic construct
  REGION 1..11: note = Description of Artificial Sequence: Synthetic peptide
  MOD_RES 2: note = Aib
  MOD_RES 6: note = Alpha-MeF
  MOD_RES 10: note = EtBip
  MOD_RES 11: note = Lys(C18)
  REGION 1..11: note = C-term amide
HXQGTFTSDXK

SEQ ID NO: 671 - protein, 11 aa, synthetic construct
  REGION 1..11: note = Description of Artificial Sequence: Synthetic peptide
  MOD_RES 2: note = Aib
  MOD_RES 6: note = Alpha-MeF
  MOD_RES 10: note = EtBip
  MOD_RES 11: note = Lys(C20)
  REGION 1..11: note = C-term amide
HXQGTFTSDXK

SEQ ID NO: 672 - protein, 11 aa, synthetic construct
  REGION 1..11: note = Description of Artificial Sequence: Synthetic peptide
  MOD_RES 2: note = Aib
  MOD_RES 6: note = Alpha-MeFF
  MOD_RES 10: note = EtBip
  MOD_RES 11: note = Lys(C8)
  REGION 1..11: note = C-term amide
HXQGTFTSDXK

SEQ ID NO: 673 - protein, 11 aa, synthetic construct
  REGION 1..11: note = Description of Artificial Sequence: Synthetic peptide
  MOD_RES 2: note = Aib
  MOD_RES 6: note = Alpha-MeFF
  MOD_RES 10: note = EtBip
  MOD_RES 11: note = Lys(C12)
  REGION 1..11: note = C-term amide
HXQGTFTSDXK

SEQ ID NO: 674 - protein, 11 aa, synthetic construct
  REGION 1..11: note = Description of Artificial Sequence: Synthetic peptide
  MOD_RES 2: note = Aib
  MOD_RES 6: note = Alpha-MeFF
  MOD_RES 10: note = EtBip
  MOD_RES 11: note = Lys(C14)
  REGION 1..11: note = C-term amide
HXQGTFTSDXK

SEQ ID NO: 675 - protein, 11 aa, synthetic construct
  REGION 1..11: note = Description of Artificial Sequence: Synthetic peptide
  MOD_RES 2: note = Aib
  MOD_RES 6: note = Alpha-MeFF
  MOD_RES 10: note = EtBip
  MOD_RES 11: note = Lys(C16)
  REGION 1..11: note = C-term amide
HXQGTFTSDXK

SEQ ID NO: 676 - protein, 11 aa, synthetic construct
  REGION 1..11: note = Description of Artificial Sequence: Synthetic peptide
  MOD_RES 2: note = Aib
  MOD_RES 6: note = Alpha-MeFF
  MOD_RES 10: note = EtBip
  MOD_RES 11: note = Lys(C18)
  REGION 1..11: note = C-term amide
HXQGTFTSDXK

SEQ ID NO: 677 - protein, 11 aa, synthetic construct
  REGION 1..11: note = Description of Artificial Sequence: Synthetic peptide
  MOD_RES 2: note = Aib
  MOD_RES 6: note = Alpha-MeFF
  MOD_RES 10: note = EtBip
  MOD_RES 11: note = Lys(C20)
  REGION 1..11: note = C-term amide
HXQGTFTSDXK

SEQ ID NO: 678 - protein, 11 aa, synthetic construct
  REGION 1..11: note = Description of Artificial Sequence: Synthetic peptide
  MOD_RES 2: note = Alpha-MePro
  MOD_RES 6: note = Alpha-MeF
  MOD_RES 10: note = EtBip
  MOD_RES 11: note = MeLys(C8)
  REGION 1..11: note = C-term amide
HPQGTFTSDXK

SEQ ID NO: 679 - protein, 11 aa, synthetic construct
  REGION 1..11: note = Description of Artificial Sequence: Synthetic peptide
  MOD_RES 2: note = Alpha-MePro
  MOD_RES 6: note = Alpha-MeF
  MOD_RES 10: note = EtBip
  MOD_RES 11: note = MeLys(C12)
  REGION 1..11: note = C-term amide
HPQGTFTSDXK

SEQ ID NO: 680 - protein, 11 aa, synthetic construct
  REGION 1..11: note = Description of Artificial Sequence: Synthetic peptide
  MOD_RES 2: note = Alpha-MePro
  MOD_RES 6: note = Alpha-MeF
  MOD_RES 10: note = EtBip
  MOD_RES 11: note = MeLys(C14)
  REGION 1..11: note = C-term amide
HPQGTFTSDXK

SEQ ID NO: 681 - protein, 11 aa, synthetic construct
  REGION 1..11: note = Description of Artificial Sequence: Synthetic peptide
  MOD_RES 2: note = Alpha-MePro
  MOD_RES 6: note = Alpha-MeF
  MOD_RES 10: note = EtBip
  MOD_RES 11: note = MeLys(C16)
  REGION 1..11: note = C-term amide
HPQGTFTSDXK

SEQ ID NO: 682 - protein, 11 aa, synthetic construct
  REGION 1..11: note = Description of Artificial Sequence: Synthetic peptide
  MOD_RES 2: note = Alpha-MePro
  MOD_RES 6: note = Alpha-MeF
  MOD_RES 10: note = EtBip
  MOD_RES 11: note = MeLys(C18)
  REGION 1..11: note = C-term amide
HPQGTFTSDXK

SEQ ID NO: 683 - protein, 11 aa, synthetic construct
  REGION 1..11: note = Description of Artificial Sequence: Synthetic peptide
  MOD_RES 2: note = Alpha-MePro
  MOD_RES 6: note = Alpha-MeF
  MOD_RES 10: note = EtBip
  MOD_RES 11: note = MeLys(C20)
  REGION 1..11: note = C-term amide
HPQGTFTSDXK

SEQ ID NO: 684 - protein, 11 aa, synthetic construct
  REGION 1..11: note = Description of Artificial Sequence: Synthetic peptide
  MOD_RES 2: note = Alpha-MePro
  MOD_RES 6: note = Alpha-MeFF
  MOD_RES 10: note = EtBip
  MOD_RES 11: note = MeLys(C8)
  REGION 1..11: note = C-term amide
HPQGTFTSDXK

SEQ ID NO: 685 - protein, 11 aa, synthetic construct
  REGION 1..11: note = Description of Artificial Sequence: Synthetic peptide
  MOD_RES 2: note = Alpha-MePro
  MOD_RES 6: note = Alpha-MeFF
  MOD_RES 10: note = EtBip
  MOD_RES 11: note = MeLys(C12)
  REGION 1..11: note = C-term amide
HPQGTFTSDXK

SEQ ID NO: 686 - protein, 11 aa, synthetic construct
  REGION 1..11: note = Description of Artificial Sequence: Synthetic peptide
  MOD_RES 2: note = Alpha-MePro
  MOD_RES 6: note = Alpha-MeFF
  MOD_RES 10: note = EtBip
  MOD_RES 11: note = MeLys(C14)
  REGION 1..11: note = C-term amide
HPQGTFTSDXK

SEQ ID NO: 687 - protein, 11 aa, synthetic construct
  REGION 1..11: note = Description of Artificial Sequence: Synthetic peptide
  MOD_RES 2: note = Alpha-MePro
  MOD_RES 6: note = Alpha-MeFF
  MOD_RES 10: note = EtBip
  MOD_RES 11: note = MeLys(C16)
  REGION 1..11: note = C-term amide
HPQGTFTSDXK

SEQ ID NO: 688 - protein, 11 aa, synthetic construct
  REGION 1..11: note = Description of Artificial Sequence: Synthetic peptide
  MOD_RES 2: note = Alpha-MePro
  MOD_RES 6: note = Alpha-MeFF
  MOD_RES 10: note = EtBip
  MOD_RES 11: note = MeLys(C18)
  REGION 1..11: note = C-term amide
HPQGTFTSDXK

SEQ ID NO: 689 - protein, 11 aa, synthetic construct
  REGION 1..11: note = Description of Artificial Sequence: Synthetic peptide
  MOD_RES 2: note = Alpha-MePro
  MOD_RES 6: note = Alpha-MeFF
  MOD_RES 10: note = EtBip
  MOD_RES 11: note = MeLys(C20)
  REGION 1..11: note = C-term amide
HPQGTFTSDXK

SEQ ID NO: 690 - protein, 11 aa, synthetic construct
  REGION 1..11: note = Description of Artificial Sequence: Synthetic peptide
  MOD_RES 2: note = Aib
  MOD_RES 6: note = Alpha-MeF
  MOD_RES 10: note = EtBip
  MOD_RES 11: note = MeLys(C8)
  REGION 1..11: note = C-term amide
HXQGTFTSDXK

SEQ ID NO: 691 - protein, 11 aa, synthetic construct
  REGION 1..11: note = Description of Artificial Sequence: Synthetic peptide
  MOD_RES 2: note = Aib
  MOD_RES 6: note = Alpha-MeF
  MOD_RES 10: note = EtBip
  MOD_RES 11: note = MeLys(C12)
  REGION 1..11: note = C-term amide
HXQGTFTSDXK

SEQ ID NO: 692 - protein, 11 aa, synthetic construct
  REGION 1..11: note = Description of Artificial Sequence: Synthetic peptide
  MOD_RES 2: note = Aib
  MOD_RES 6: note = Alpha-MeF
  MOD_RES 10: note = EtBip
  MOD_RES 11: note = MeLys(C14)
  REGION 1..11: note = C-term amide
HXQGTFTSDXK

SEQ ID NO: 693 - protein, 11 aa, synthetic construct
  REGION 1..11: note = Description of Artificial Sequence: Synthetic peptide
  MOD_RES 2: note = Aib
  MOD_RES 6: note = Alpha-MeF
  MOD_RES 10: note = EtBip
  MOD_RES 11: note = MeLys(C16)
  REGION 1..11: note = C-term amide
HXQGTFTSDXK

SEQ ID NO: 694 - protein, 11 aa, synthetic construct
  REGION 1..11: note = Description of Artificial Sequence: Synthetic peptide
  MOD_RES 2: note = Aib
  MOD_RES 6: note = Alpha-MeF
  MOD_RES 10: note = EtBip
  MOD_RES 11: note = MeLys(C18)
  REGION 1..11: note = C-term amide
HXQGTFTSDXK

SEQ ID NO: 695 - protein, 11 aa, synthetic construct
  REGION 1..11: note = Description of Artificial Sequence: Synthetic peptide
  MOD_RES 2: note = Aib
  MOD_RES 6: note = Alpha-MeF
  MOD_RES 10: note = EtBip
  MOD_RES 11: note = MeLys(C20)
  REGION 1..11: note = C-term amide
HXQGTFTSDXK

SEQ ID NO: 696 - protein, 11 aa, synthetic construct
  REGION 1..11: note = Description of Artificial Sequence: Synthetic peptide
  MOD_RES 2: note = Aib
  MOD_RES 6: note = Alpha-MeFF
  MOD_RES 10: note = EtBip
  MOD_RES 11: note = MeLys(C8)
  REGION 1..11: note = C-term amide
HXQGTFTSDXK

SEQ ID NO: 697 - protein, 11 aa, synthetic construct
  REGION 1..11: note = Description of Artificial Sequence: Synthetic peptide
  MOD_RES 2: note = Aib
  MOD_RES 6: note = Alpha-MeFF
  MOD_RES 10: note = EtBip
  MOD_RES 11: note = MeLys(C12)
  REGION 1..11: note = C-term amide
HXQGTFTSDXK

SEQ ID NO: 698 - protein, 11 aa, synthetic construct
  REGION 1..11: note = Description of Artificial Sequence: Synthetic peptide
  MOD_RES 2: note = Aib
  MOD_RES 6: note = Alpha-MeFF
  MOD_RES 10: note = EtBip
  MOD_RES 11: note = MeLys(C14)
  REGION 1..11: note = C-term amide
HXQGTFTSDXK

SEQ ID NO: 699 - protein, 11 aa, synthetic construct
  REGION 1..11: note = Description of Artificial Sequence: Synthetic peptide
  MOD_RES 2: note = Aib
  MOD_RES 6: note = Alpha-MeFF
  MOD_RES 10: note = EtBip
  MOD_RES 11: note = MeLys(C16)
  REGION 1..11: note = C-term amide
HXQGTFTSDXK

SEQ ID NO: 700 - protein, 11 aa, synthetic construct
  REGION 1..11: note = Description of Artificial Sequence: Synthetic peptide
  MOD_RES 2: note = Aib
  MOD_RES 6: note = Alpha-MeFF
  MOD_RES 10: note = EtBip
  MOD_RES 11: note = MeLys(C18)
  REGION 1..11: note = C-term amide
HXQGTFTSDXK

SEQ ID NO: 701 - protein, 11 aa, synthetic construct
  REGION 1..11: note = Description of Artificial Sequence: Synthetic peptide
  MOD_RES 2: note = Aib
  MOD_RES 6: note = Alpha-MeFF
  MOD_RES 10: note = EtBip
  MOD_RES 11: note = MeLys(C20)
  REGION 1..11: note = C-term amide
HXQGTFTSDXK

SEQ ID NO: 702 - protein, 11 aa, synthetic construct
  REGION 1..11: note = Description of Artificial Sequence: Synthetic peptide
  MOD_RES 2: note = Alpha-MePro
  MOD_RES 6: note = Alpha-MeF
  MOD_RES 10: note = EtBip
  MOD_RES 11: note = Me8
  REGION 1..11: note = C-term amide
HPQGTFTSDXK

SEQ ID NO: 703 - protein, 11 aa, synthetic construct
  REGION 1..11: note = Description of Artificial Sequence: Synthetic peptide
  MOD_RES 2: note = Alpha-MePro
  MOD_RES 6: note = Alpha-MeF
  MOD_RES 10: note = EtBip
  MOD_RES 11: note = Me12
  REGION 1..11: note = C-term amide
HPQGTFTSDXK

SEQ ID NO: 704 - protein, 11 aa, synthetic construct
  REGION 1..11: note = Description of Artificial Sequence: Synthetic peptide
  MOD_RES 2: note = Alpha-MePro
  MOD_RES 6: note = Alpha-MeF
  MOD_RES 10: note = EtBip
  MOD_RES 11: note = Me14
  REGION 1..11: note = C-term amide
HPQGTFTSDXK

SEQ ID NO: 705 - protein, 11 aa, synthetic construct
  REGION 1..11: note = Description of Artificial Sequence: Synthetic peptide
  MOD_RES 2: note = Alpha-MePro
  MOD_RES 6: note = Alpha-MeF
  MOD_RES 10: note = EtBip
  MOD_RES 11: note = Me16
  REGION 1..11: note = C-term amide
HPQGTFTSDXK

SEQ ID NO: 706 - protein, 11 aa, synthetic construct
  REGION 1..11: note = Description of Artificial Sequence: Synthetic peptide
  MOD_RES 2: note = Alpha-MePro
  MOD_RES 6: note = Alpha-MeF
  MOD_RES 10: note = EtBip
  MOD_RES 11: note = Me18
  REGION 1..11: note = C-term amide
HPQGTFTSDXK

SEQ ID NO: 707 - protein, 11 aa, synthetic construct
  REGION 1..11: note = Description of Artificial Sequence: Synthetic peptide
  MOD_RES 2: note = Alpha-MePro
  MOD_RES 6: note = Alpha-MeF
  MOD_RES 10: note = EtBip
  MOD_RES 11: note = Me20
  REGION 1..11: note = C-term amide
HPQGTFTSDXK

SEQ ID NO: 708 - protein, 11 aa, synthetic construct
  REGION 1..11: note = Description of Artificial Sequence: Synthetic peptide
  MOD_RES 2: note = Alpha-MePro
  MOD_RES 6: note = Alpha-MeFF
  MOD_RES 10: note = EtBip
  MOD_RES 11: note = Me8
  REGION 1..11: note = C-term amide
HPQGTFTSDXK

SEQ ID NO: 709 - protein, 11 aa, synthetic construct
  REGION 1..11: note = Description of Artificial Sequence: Synthetic peptide
  MOD_RES 2: note = Alpha-MePro
  MOD_RES 6: note = Alpha-MeFF
  MOD_RES 10: note = EtBip
  MOD_RES 11: note = Me12
  REGION 1..11: note = C-term amide
HPQGTFTSDXK

SEQ ID NO: 710 - protein, 11 aa, synthetic construct
  REGION 1..11: note = Description of Artificial Sequence: Synthetic peptide
  MOD_RES 2: note = Alpha-MePro
  MOD_RES 6: note = Alpha-MeFF
  MOD_RES 10: note = EtBip
  MOD_RES 11: note = Me14
  REGION 1..11: note = C-term amide
HPQGTFTSDXK

SEQ ID NO: 711 - protein, 11 aa, synthetic construct
  REGION 1..11: note = Description of Artificial Sequence: Synthetic peptide
  MOD_RES 2: note = Alpha-MePro
  MOD_RES 6: note = Alpha-MeFF
  MOD_RES 10: note = EtBip
  MOD_RES 11: note = Me16
  REGION 1..11: note = C-term amide
HPQGTFTSDXK

SEQ ID NO: 712 - protein, 11 aa, synthetic construct
  REGION 1..11: note = Description of Artificial Sequence: Synthetic peptide
  MOD_RES 2: note = Alpha-MePro
  MOD_RES 6: note = Alpha-MeFF
  MOD_RES 10: note = EtBip
  MOD_RES 11: note = Me18
  REGION 1..11: note = C-term amide
HPQGTFTSDXK

SEQ ID NO: 713 - protein, 11 aa, synthetic construct
  REGION 1..11: note = Description of Artificial Sequence: Synthetic peptide
  MOD_RES 2: note = Alpha-MePro
  MOD_RES 6: note = Alpha-MeFF
  MOD_RES 10: note = EtBip
  MOD_RES 11: note = Me20
  REGION 1..11: note = C-term amide
HPQGTFTSDXK

SEQ ID NO: 714 - protein, 11 aa, synthetic construct
  REGION 1..11: note = Description of Artificial Sequence: Synthetic peptide
  MOD_RES 2: note = Aib
  MOD_RES 6: note = Alpha-MeF
  MOD_RES 10: note = EtBip
  MOD_RES 11: note = Me8
  REGION 1..11: note = C-term amide
HXQGTFTSDXK

SEQ ID NO: 715 - protein, 11 aa, synthetic construct
  REGION 1..11: note = Description of Artificial Sequence: Synthetic peptide
  MOD_RES 2: note = Aib
  MOD_RES 6: note = Alpha-MeF
  MOD_RES 10: note = EtBip
  MOD_RES 11: note = Me12
  REGION 1..11: note = C-term amide
HXQGTFTSDXK

SEQ ID NO: 716 - protein, 11 aa, synthetic construct
  REGION 1..11: note = Description of Artificial Sequence: Synthetic peptide
  MOD_RES 2: note = Aib
  MOD_RES 6: note = Alpha-MeF
  MOD_RES 10: note = EtBip
  MOD_RES 11: note = Me14
  REGION 1..11: note = C-term amide
HXQGTFTSDXK

SEQ ID NO: 717 - protein, 11 aa, synthetic construct
  REGION 1..11: note = Description of Artificial Sequence: Synthetic peptide
  MOD_RES 2: note = Aib
  MOD_RES 6: note = Alpha-MeF
  MOD_RES 10: note = EtBip
  MOD_RES 11: note = Me16
  REGION 1..11: note = C-term amide
HXQGTFTSDXK

SEQ ID NO: 718 - protein, 11 aa, synthetic construct
  REGION 1..11: note = Description of Artificial Sequence: Synthetic peptide
  MOD_RES 2: note = Aib
  MOD_RES 6: note = Alpha-MeF
  MOD_RES 10: note = EtBip
  MOD_RES 11: note = Me18
  REGION 1..11: note = C-term amide
HXQGTFTSDXK

SEQ ID NO: 719 - protein, 11 aa, synthetic construct
  REGION 1..11: note = Description of Artificial Sequence: Synthetic peptide
  MOD_RES 2: note = Aib
  MOD_RES 6: note = Alpha-MeFF
  MOD_RES 10: note = EtBip
  MOD_RES 11: note = Me20
  REGION 1..11: note = C-term amide
HXQGTFTSDXK

SEQ ID NO: 720 - protein, 11 aa, synthetic construct
  REGION 1..11: note = Description of Artificial Sequence: Synthetic peptide
  MOD_RES 2: note = Aib
  MOD_RES 6: note = Alpha-MeFF
  MOD_RES 10: note = EtBip
  MOD_RES 11: note = Me8
  REGION 1..11: note = C-term amide
HXQGTFTSDXK

SEQ ID NO: 721 - protein, 11 aa, synthetic construct
  REGION 1..11: note = Description of Artificial Sequence: Synthetic peptide
  MOD_RES 2: note = Aib
  MOD_RES 6: note = Alpha-MeFF
  MOD_RES 10: note = EtBip
  MOD_RES 11: note = Me12
  REGION 1..11: note = C-term amide
HXQGTFTSDXK

SEQ ID NO: 722 - protein, 11 aa, synthetic construct
  REGION 1..11: note = Description of Artificial Sequence: Synthetic peptide
  MOD_RES 2: note = Aib
  MOD_RES 6: note = Alpha-MeFF
  MOD_RES 10: note = EtBip
  MOD_RES 11: note = Me14
  REGION 1..11: note = C-term amide
HXQGTFTSDXK

SEQ ID NO: 723 - protein, 11 aa, synthetic construct
  REGION 1..11: note = Description of Artificial Sequence: Synthetic peptide
  MOD_RES 2: note = Aib
  MOD_RES 6: note = Alpha-MeFF
  MOD_RES 10: note = EtBip
  MOD_RES 11: note = Me16
  REGION 1..11: note = C-term amide
HXQGTFTSDXK

SEQ ID NO: 724 - protein, 11 aa, synthetic construct
  REGION 1..11: note = Description of Artificial Sequence: Synthetic peptide
  MOD_RES 2: note = Aib
  MOD_RES 6: note = Alpha-MeFF
  MOD_RES 10: note = EtBip
  MOD_RES 11: note = Me18
  REGION 1..11: note = C-term amide
HXQGTFTSDXK

SEQ ID NO: 725 - protein, 11 aa, synthetic construct
  REGION 1..11: note = Description of Artificial Sequence: Synthetic peptide
  MOD_RES 2: note = Aib
  MOD_RES 6: note = Alpha-MeFF
  MOD_RES 10: note = EtBip
  MOD_RES 11: note = Me20
  REGION 1..11: note = C-term amide
HXQGTFTSDXK

SEQ ID NO: 726 - protein, 11 aa, synthetic construct
  REGION 1..11: note = Description of Artificial Sequence: Synthetic peptide
  MOD_RES 2: note = Alpha-MePro
  MOD_RES 6: note = Alpha-MeF
  MOD_RES 10: note = Bip
  MOD_RES 11: note = MeLys(C8)
  REGION 1..11: note = C-term amide
HPQGTFTSDXK

SEQ ID NO: 727 - protein, 11 aa, synthetic construct
  REGION 1..11: note = Description of Artificial Sequence: Synthetic peptide
  MOD_RES 2: note = Alpha-MePro
  MOD_RES 6: note = Alpha-MeF
  MOD_RES 10: note = Bip
  MOD_RES 11: note = MeLys(C12)
  REGION 1..11: note = C-term amide
HPQGTFTSDXK

SEQ ID NO: 728 - protein, 11 aa, synthetic construct
  REGION 1..11: note = Description of Artificial Sequence: Synthetic peptide
  MOD_RES 2: note = Alpha-MePro
  MOD_RES 6: note = Alpha-MeF
  MOD_RES 10: note = Bip
  MOD_RES 11: note = MeLys(C14)
  REGION 1..11: note = C-term amide
HPQGTFTSDXK

SEQ ID NO: 729 - protein, 11 aa, synthetic construct
  REGION 1..11: note = Description of Artificial Sequence: Synthetic peptide
  MOD_RES 2: note = Alpha-MePro
  MOD_RES 6: note = Alpha-MeF
  MOD_RES 10: note = Bip
  MOD_RES 11: note = MeLys(C16)
  REGION 1..11: note = C-term amide
HPQGTFTSDXK

SEQ ID NO: 730 - protein, 11 aa, synthetic construct
  REGION 1..11: note = Description of Artificial Sequence: Synthetic peptide
  MOD_RES 2: note = Alpha-MePro
  MOD_RES 6: note = Alpha-MeF
  MOD_RES 10: note = Bip
  MOD_RES 11: note = MeLys(C18)
  REGION 1..11: note = C-term amide
HPQGTFTSDXK

SEQ ID NO: 731 - protein, 11 aa, synthetic construct
  REGION 1..11: note = Description of Artificial Sequence: Synthetic peptide
  MOD_RES 2: note = Alpha-MePro
  MOD_RES 6: note = Alpha-MeF
  MOD_RES 10: note = Bip
  MOD_RES 11: note = MeLys(C20)
  REGION 1..11: note = C-term amide
HPQGTFTSDXK

SEQ ID NO: 732 - protein, 11 aa, synthetic construct
  REGION 1..11: note = Description of Artificial Sequence: Synthetic peptide
  MOD_RES 2: note = Alpha-MePro
  MOD_RES 6: note = Alpha-MeFF
  MOD_RES 10: note = Bip
  MOD_RES 11: note = MeLys(C8)
  REGION 1..11: note = C-term amide
HPQGTFTSDXK

SEQ ID NO: 733 - protein, 11 aa, synthetic construct
  REGION 1..11: note = Description of Artificial Sequence: Synthetic peptide
  MOD_RES 2: note = Alpha-MePro
  MOD_RES 6: note = Alpha-MeFF
  MOD_RES 10: note = Bip
  MOD_RES 11: note = MeLys(C12)
  REGION 1..11: note = C-term amide
HPQGTFTSDXK

SEQ ID NO: 734 - protein, 11 aa, synthetic construct
  REGION 1..11: note = Description of Artificial Sequence: Synthetic peptide
  MOD_RES 2: note = Alpha-MePro
  MOD_RES 6: note = Alpha-MeFF
  MOD_RES 10: note = Bip
  MOD_RES 11: note = MeLys(C14)
  REGION 1..11: note = C-term amide
HPQGTFTSDXK

SEQ ID NO: 735 - protein, 11 aa, synthetic construct
  REGION 1..11: note = Description of Artificial Sequence: Synthetic peptide
  MOD_RES 2: note = Alpha-MePro
  MOD_RES 6: note = Alpha-MeFF
  MOD_RES 10: note = Bip
  MOD_RES 11: note = MeLys(C16)
  REGION 1..11: note = C-term amide
HPQGTFTSDXK

SEQ ID NO: 736 - protein, 11 aa, synthetic construct
  REGION 1..11: note = Description of Artificial Sequence: Synthetic peptide
  MOD_RES 2: note = Alpha-MePro
  MOD_RES 6: note = Alpha-MeFF
  MOD_RES 10: note = Bip
  MOD_RES 11: note = MeLys(C18)
  REGION 1..11: note = C-term amide
HPQGTFTSDXK

SEQ ID NO: 737 - protein, 11 aa, synthetic construct
  REGION 1..11: note = Description of Artificial Sequence: Synthetic peptide
  MOD_RES 2: note = Alpha-MePro
  MOD_RES 6: note = Alpha-MeFF
  MOD_RES 10: note = Bip
  MOD_RES 11: note = MeLys(C20)
  REGION 1..11: note = C-term amide
HPQGTFTSDXK

SEQ ID NO: 738 - protein, 11 aa, synthetic construct
  REGION 1..11: note = Description of Artificial Sequence: Synthetic peptide
  MOD_RES 2: note = Aib
  MOD_RES 6: note = Alpha-MeF
  MOD_RES 10: note = Bip
  MOD_RES 11: note = MeLys(C8)
  REGION 1..11: note = C-term amide
HXQGTFTSDXK

SEQ ID NO: 739 - protein, 11 aa, synthetic construct
  REGION 1..11: note = Description of Artificial Sequence: Synthetic peptide
  MOD_RES 2: note = Aib
  MOD_RES 6: note = Alpha-MeF
  MOD_RES 10: note = Bip
  MOD_RES 11: note = MeLys(C12)
  REGION 1..11: note = C-term amide
HXQGTFTSDXK

SEQ ID NO: 740 - protein, 11 aa, synthetic construct
  REGION 1..11: note = Description of Artificial Sequence: Synthetic peptide
  MOD_RES 2: note = Aib
  MOD_RES 6: note = Alpha-MeF
  MOD_RES 10: note = Bip
  MOD_RES 11: note = MeLys(C14)
  REGION 1..11: note = C-term amide
HXQGTFTSDXK

SEQ ID NO: 741 - protein, 11 aa, synthetic construct
  REGION 1..11: note = Description of Artificial Sequence: Synthetic peptide
  MOD_RES 2: note = Aib
  MOD_RES 6: note = Alpha-MeF
  MOD_RES 10: note = Bip
  MOD_RES 11: note = MeLys(C16)
  REGION 1..11: note = C-term amide
HXQGTFTSDXK

SEQ ID NO: 742 - protein, 11 aa, synthetic construct
  REGION 1..11: note = Description of Artificial Sequence: Synthetic peptide
  MOD_RES 2: note = Aib
  MOD_RES 6: note = Alpha-MeF
  MOD_RES 10: note = Bip
  MOD_RES 11: note = MeLys(C18)
  REGION 1..11: note = C-term amide
HXQGTFTSDXK

SEQ ID NO: 743 - protein, 11 aa, synthetic construct
  REGION 1..11: note = Description of Artificial Sequence: Synthetic peptide
  MOD_RES 2: note = Aib
  MOD_RES 6: note = Alpha-MeF
  MOD_RES 10: note = Bip
  MOD_RES 11: note = MeLys(C20)
  REGION 1..11: note = C-term amide
HXQGTFTSDXK

SEQ ID NO: 744 - protein, 11 aa, synthetic construct
  REGION 1..11: note = Description of Artificial Sequence: Synthetic peptide
  MOD_RES 2: note = Aib
  MOD_RES 6: note = Alpha-MeFF
  MOD_RES 10: note = Bip
  MOD_RES 11: note = MeLys(C8)
  REGION 1..11: note = C-term amide
HXQGTFTSDXK

SEQ ID NO: 745 - protein, 11 aa, synthetic construct
  REGION 1..11: note = Description of Artificial Sequence: Synthetic peptide
  MOD_RES 2: note = Aib
  MOD_RES 6: note = Alpha-MeFF
  MOD_RES 10: note = Bip
  MOD_RES 11: note = MeLys(C12)
  REGION 1..11: note = C-term amide
HXQGTFTSDXK

SEQ ID NO: 746 - protein, 11 aa, synthetic construct
  REGION 1..11: note = Description of Artificial Sequence: Synthetic peptide
  MOD_RES 2: note = Aib
  MOD_RES 6: note = Alpha-MeFF
  MOD_RES 10: note = Bip
  MOD_RES 11: note = MeLys(C14)
  REGION 1..11: note = C-term amide
HXQGTFTSDXK

SEQ ID NO: 747 - protein, 11 aa, synthetic construct
  REGION 1..11: note = Description of Artificial Sequence: Synthetic peptide
  MOD_RES 2: note = Aib
  MOD_RES 6: note = Alpha-MeFF
  MOD_RES 10: note = Bip
  MOD_RES 11: note = MeLys(C16)
  REGION 1..11: note = C-term amide
HXQGTFTSDXK

SEQ ID NO: 748 - protein, 11 aa, synthetic construct
  REGION 1..11: note = Description of Artificial Sequence: Synthetic peptide
  MOD_RES 2: note = Aib
  MOD_RES 6: note = Alpha-MeFF
  MOD_RES 10: note = Bip
  MOD_RES 11: note = MeLys(C18)
  REGION 1..11: note = C-term amide
HXQGTFTSDXK

SEQ ID NO: 749 - protein, 11 aa, synthetic construct
  REGION 1..11: note = Description of Artificial Sequence: Synthetic peptide
  MOD_RES 2: note = Aib
  MOD_RES 6: note = Alpha-MeFF
  MOD_RES 10: note = Bip
  MOD_RES 11: note = MeLys(C20)
  REGION 1..11: note = C-term amide
HXQGTFTSDXK

SEQ ID NO: 750 - protein, 11 aa, synthetic construct
  REGION 1..11: note = Description of Artificial Sequence: Synthetic peptide
  MOD_RES 2: note = Alpha-MePro
  MOD_RES 6: note = Alpha-MeF
  MOD_RES 10: note = Bip
  MOD_RES 11: note = Me8
  REGION 1..11: note = C-term amide
HPQGTFTSDXK

SEQ ID NO: 751 - protein, 11 aa, synthetic construct
  REGION 1..11: note = Description of Artificial Sequence: Synthetic peptide
  MOD_RES 2: note = Alpha-MePro
  MOD_RES 6: note = Alpha-MeF
  MOD_RES 10: note = Bip
  MOD_RES 11: note = Me12
  REGION 1..11: note = C-term amide
HPQGTFTSDXK

SEQ ID NO: 752 - protein, 11 aa, synthetic construct
  REGION 1..11: note = Description of Artificial Sequence: Synthetic peptide
  MOD_RES 2: note = Alpha-MePro
  MOD_RES 6: note = Alpha-MeF
  MOD_RES 10: note = Bip
  MOD_RES 11: note = Me14
  REGION 1..11: note = C-term amide
HPQGTFTSDXK

SEQ ID NO: 753 - protein, 11 aa, synthetic construct
  REGION 1..11: note = Description of Artificial Sequence: Synthetic peptide
  MOD_RES 2: note = Alpha-MePro
  MOD_RES 6: note = Alpha-MeF
  MOD_RES 10: note = Bip
  MOD_RES 11: note = Me16
  REGION 1..11: note = C-term amide
HPQGTFTSDXK

SEQ ID NO: 754 - protein, 11 aa, synthetic construct
  REGION 1..11: note = Description of Artificial Sequence: Synthetic peptide
  MOD_RES 2: note = Alpha-MePro
  MOD_RES 6: note = Alpha-MeF
  MOD_RES 10: note = Bip
  MOD_RES 11: note = Me18
  REGION 1..11: note = C-term amide
HPQGTFTSDXK

SEQ ID NO: 755 - protein, 11 aa, synthetic construct
  REGION 1..11: note = Description of Artificial Sequence: Synthetic peptide
  MOD_RES 2: note = Alpha-MePro
  MOD_RES 6: note = Alpha-MeF
  MOD_RES 10: note = Bip
  MOD_RES 11: note = Me20
  REGION 1..11: note = C-term amide
HPQGTFTSDXK

SEQ ID NO: 756 - protein, 11 aa, synthetic construct
  REGION 1..11: note = Description of Artificial Sequence: Synthetic peptide
  MOD_RES 2: note = Alpha-MePro
  MOD_RES 6: note = Alpha-MeFF
  MOD_RES 10: note = Bip
  MOD_RES 11: note = Me8
  REGION 1..11: note = C-term amide
HPQGTFTSDXK

SEQ ID NO: 757 - protein, 11 aa, synthetic construct
  REGION 1..11: note = Description of Artificial Sequence: Synthetic peptide
  MOD_RES 2: note = Alpha-MePro
  MOD_RES 6: note = Alpha-MeFF
  MOD_RES 10: note = Bip
  MOD_RES 11: note = Me12
  REGION 1..11: note = C-term amide
HPQGTFTSDXK

SEQ ID NO: 758 - protein, 11 aa, synthetic construct
  REGION 1..11: note = Description of Artificial Sequence: Synthetic peptide
  MOD_RES 2: note = Alpha-MePro
  MOD_RES 6: note = Alpha-MeFF
  MOD_RES 10: note = Bip
  MOD_RES 11: note = Me14
  REGION 1..11: note = C-term amide
HPQGTFTSDXK

SEQ ID NO: 759 - protein, 11 aa, synthetic construct
  REGION 1..11: note = Description of Artificial Sequence: Synthetic peptide
  MOD_RES 2: note = Alpha-MePro
  MOD_RES 6: note = Alpha-MeFF
  MOD_RES 10: note = Bip
  MOD_RES 11: note = Me16
  REGION 1..11: note = C-term amide
HPQGTFTSDXK

SEQ ID NO: 760 - protein, 11 aa, synthetic construct
  REGION 1..11: note = Description of Artificial Sequence: Synthetic peptide
  MOD_RES 2: note = Alpha-MePro
  MOD_RES 6: note = Alpha-MeFF
  MOD_RES 10: note = Bip
  MOD_RES 11: note = Me18
  REGION 1..11: note = C-term amide
HPQGTFTSDXK

SEQ ID NO: 761 - protein, 11 aa, synthetic construct
  REGION 1..11: note = Description of Artificial Sequence: Synthetic peptide
  MOD_RES 2: note = Alpha-MePro
  MOD_RES 6: note = Alpha-MeFF
  MOD_RES 10: note = Bip
  MOD_RES 11: note = Me20
  REGION 1..11: note = C-term amide
HPQGTFTSDXK

SEQ ID NO: 762 - protein, 11 aa, synthetic construct
  REGION 1..11: note = Description of Artificial Sequence: Synthetic peptide
  MOD_RES 2: note = Aib
  MOD_RES 6: note = Alpha-MeF
  MOD_RES 10: note = Bip
  MOD_RES 11: note = Me8
  REGION 1..11: note = C-term amide
HXQGTFTSDXK

SEQ ID NO: 763 - protein, 11 aa, synthetic construct
  REGION 1..11: note = Description of Artificial Sequence: Synthetic peptide
  MOD_RES 2: note = Aib
  MOD_RES 6: note = Alpha-MeF
  MOD_RES 10: note = Bip
  MOD_RES 11: note = Me12
  REGION 1..11: note = C-term amide
HXQGTFTSDXK

SEQ ID NO: 764 - protein, 11 aa, synthetic construct
  REGION 1..11: note = Description of Artificial Sequence: Synthetic peptide
  MOD_RES 2: note = Aib
  MOD_RES 6: note = Alpha-MeF
  MOD_RES 10: note = Bip
  MOD_RES 11: note = Me14
  REGION 1..11: note = C-term amide
HXQGTFTSDXK

SEQ ID NO: 765 - protein, 11 aa, synthetic construct
  REGION 1..11: note = Description of Artificial Sequence: Synthetic peptide
  MOD_RES 2: note = Aib
  MOD_RES 6: note = Alpha-MeF
  MOD_RES 10: note = Bip
  MOD_RES 11: note = Me16
  REGION 1..11: note = C-term amide
HXQGTFTSDXK

SEQ ID NO: 766 - protein, 11 aa, synthetic construct
  REGION 1..11: note = Description of Artificial Sequence: Synthetic peptide
  MOD_RES 2: note = Aib
  MOD_RES 6: note = Alpha-MeF
  MOD_RES 10: note = Bip
  MOD_RES 11: note = Me18
  REGION 1..11: note = C-term amide
HXQGTFTSDXK

SEQ ID NO: 767 - protein, 11 aa, synthetic construct
  REGION 1..11: note = Description of Artificial Sequence: Synthetic peptide
  MOD_RES 2: note = Aib
  MOD_RES 6: note = Alpha-MeF
  MOD_RES 10: note = Bip
  MOD_RES 11: note = Me20
  REGION 1..11: note = C-term amide
HXQGTFTSDXK

SEQ ID NO: 768 - protein, 11 aa, synthetic construct
  REGION 1..11: note = Description of Artificial Sequence: Synthetic peptide
  MOD_RES 2: note = Aib
  MOD_RES 6: note = Alpha-MeFF
  MOD_RES 10: note = Bip
  MOD_RES 11: note = Me8
  REGION 1..11: note = C-term amide
HXQGTFTSDXK

SEQ ID NO: 769 - protein, 11 aa, synthetic construct
  REGION 1..11: note = Description of Artificial Sequence: Synthetic peptide
  MOD_RES 2: note = Aib
  MOD_RES 6: note = Alpha-MeFF
  MOD_RES 10: note = Bip
  MOD_RES 11: note = Me12
  REGION 1..11: note = C-term amide
HXQGTFTSDXK

SEQ ID NO: 770 - protein, 11 aa, synthetic construct
  REGION 1..11: note = Description of Artificial Sequence: Synthetic peptide
  MOD_RES 2: note = Aib
  MOD_RES 6: note = Alpha-MeFF
  MOD_RES 10: note = Bip
  MOD_RES 11: note = Me14
  REGION 1..11: note = C-term amide
HXQGTFTSDXK

SEQ ID NO: 771 - protein, 11 aa, synthetic construct
  REGION 1..11: note = Description of Artificial Sequence: Synthetic peptide
  MOD_RES 2: note = Aib
  MOD_RES 6: note = Alpha-MeFF
  MOD_RES 10: note = Bip
  MOD_RES 11: note = Me16
  REGION 1..11: note = C-term amide
HXQGTFTSDXK

SEQ ID NO: 772 - protein, 11 aa, synthetic construct
  REGION 1..11: note = Description of Artificial Sequence: Synthetic peptide
  MOD_RES 2: note = Aib
  MOD_RES 6: note = Alpha-MeFF
  MOD_RES 10: note = Bip
  MOD_RES 11: note = Me18
  REGION 1..11: note = C-term amide
HXQGTFTSDXK

SEQ ID NO: 773 - protein, 11 aa, synthetic construct
  REGION 1..11: note = Description of Artificial Sequence: Synthetic peptide
  MOD_RES 2: note = Aib
  MOD_RES 6: note = Alpha-MeFF
  MOD_RES 10: note = Bip
  MOD_RES 11: note = Me20
  REGION 1..11: note = C-term amide
HXQGTFTSDXK

SEQ ID NO: 774 - protein, 29 aa, synthetic construct
  REGION 1..29: note = Description of Artificial Sequence: Synthetic peptide
  MOD_RES 2: note = Gly or Aib
  MOD_RES 16: note = Glu, Ser, Ala, Lys or Aib
  MOD_RES 17: note = Gln, Glu, Lys or U(X); wherein "U(X)" is a natural or unnatural amino acid comprising a functional group covalently attached to the surfactant X
  MOD_RES 20: note = Lys, Glu or Arg
  MOD_RES 23: note = Ile or Val
  MOD_RES 24: note = Ala, Gln or U(X); wherein "U(X)" is a natural or unnatural amino acid comprising a functional group covalently attached to the surfactant X
  MOD_RES 27: note = Met, Val or Leu
  MOD_RES 28: note = Asn, Gln or U(X); wherein "U(X)" is a natural or unnatural amino acid comprising a functional group covalently attached to the surfactant X
HXQGTFTSDYSKYLDXXAAXEFXXWLXXT

SEQ ID NO: 775 - protein, 29 aa, synthetic construct
  REGION 1..29: note = Description of Artificial Sequence: Synthetic peptide
  MOD_RES 2: note = Gly or Aib
  MOD_RES 16: note = Glu, Ala or Aib
  MOD_RES 17: note = Lys or U(X); wherein "U(X)" is a natural or unnatural amino acid comprising a functional group covalently attached to the surfactant X
  MOD_RES 27: note = Leu or Val
HXQGTFTSDYSKYLDXXAAKEFIQWLXNT

SEQ ID NO: 776 - protein, 29 aa, synthetic construct
  REGION 1..29: note = Description of Artificial Sequence: Synthetic peptide
  MOD_RES 2: note = Gly or Aib
  MOD_RES 16: note = Glu, Ser, Ala or Aib
  MOD_RES 17: note = Arg, hArg or Gln
  MOD_RES 20: note = Lys or U(X); wherein "U(X)" is a natural or unnatural amino acid comprising a functional group covalently attached to the surfactant X
  MOD_RES 23: note = Ile or Val
  MOD_RES 24: note = Gln, Ala or U(X); wherein "U(X)" is a natural or unnatural amino acid comprising a functional group covalently attached to the surfactant X
  MOD_RES 27: note = Leu or Val
  MOD_RES 28: note = Asn, Gln or U(X); wherein "U(X)" is a natural or unnatural amino acid comprising a functional group covalently attached to the surfactant X
HXQGTFTSDYSKYLDXXRAXDFXXWLXXT

SEQ ID NO: 777 - protein, 29 aa, synthetic construct
  REGION 1..29: note = Description of Artificial Sequence: Synthetic peptide
  MOD_RES 2: note = Gly or Aib
  MOD_RES 16: note = Glu, Ser, Ala or Aib
  MOD_RES 17: note = Arg, hArg or Gln
  MOD_RES 20: note = Lys or U(X); wherein "U(X)" is a natural or unnatural amino acid comprising a functional group covalently attached to the surfactant X
  MOD_RES 23: note = Ile or Val
  MOD_RES 24: note = Gln, Ala or U(X); wherein "U(X)" is a natural or unnatural amino acid comprising a functional group covalently attached to the surfactant X
  MOD_RES 27: note = Leu or Val
  MOD_RES 28: note = Asn, Gln or U(X); wherein "U(X)" is a natural or unnatural amino acid comprising a functional group covalently attached to the surfactant X
HXQGTFTSDYSKYLDXXRAXDFXXWLXXT

SEQ ID NO: 778 - protein, 29 aa, synthetic construct
  REGION 1..29: note = Description of Artificial Sequence: Synthetic peptide
  MOD_RES 2: note = Aib or Gly
  MOD_RES 16: note = Lys or Glu cyclized through side chain to form a lactam linkage
  MOD_RES 17: note = Arg, hArg or Gln
  MOD_RES 20: note = Lys or Glu cyclized through side chain to form a lactam linkage
  MOD_RES 27: note = Met, Val, Leu or Nle
  MOD_RES 28: note = Asn or Gln
HXQGTFTSDYSKYLDXXAAXEFIKWLXXT

SEQ ID NO: 779 - protein, 29 aa, synthetic construct
  REGION 1..29: note = Description of Artificial Sequence: Synthetic peptide
  MOD_RES 2: note = Aib or Gly
  MOD_RES 16: note = Glu, Ala or Aib
  MOD_RES 17: note = Lys or Lys(N-omega-X)
  REGION 1..29: note = See specification as filed for detailed description of substitutions and preferred embodiments
HXQGTFTSDYSKYLDXXAAKEFIAWLLNT

SEQ ID NO: 780 - protein, 29 aa, synthetic construct
  REGION 1..29: note = Description of Artificial Sequence: Synthetic peptide
  MOD_RES 2: note = Gly or Aib
  MOD_RES 16: note = Glu, Ala or Aib
  MOD_RES 17: note = Arg or hArg
  MOD_RES 20: note = Lys or Lys(N-omega-X)
  MOD_RES 23: note = Ile or Val
  MOD_RES 24: note = Gln or Ala
  MOD_RES 27: note = Leu or Val
  MOD_RES 28: note = Asn or Gln
  REGION 1..29: note = See specification as filed for detailed description of substitutions and preferred embodiments
HXQGTFTSDYSKYLDXXRAXDFXXWLXXT

SEQ ID NO: 781 - protein, 11 aa, synthetic construct
  REGION 1..11: note = Description of Artificial Sequence: Synthetic peptide
  MOD_RES 2: note = Gly, Aib or MePro
  MOD_RES 6: note = Phe, 2FPhe, MePhe or 2FMePhe
  MOD_RES 10: note = Tyr, Nal2, Bip, Bip2Et or Bip2EtMeO
  MOD_RES 11: note = Lys or Lys(N-omega-X)
  REGION 1..11: note = C-term -OH or -NH-R3
  REGION 1..11: note = See specification as filed for detailed description of substitutions and preferred embodiments
HXQGTXTSDXX

SEQ ID NO: 782 - protein, 29 aa, synthetic construct
  REGION 1..29: note = Description of Artificial Sequence: Synthetic peptide
HSQGTFTSDYSKYLDSRRAQDFVQWLMNT

SEQ ID NO: 783 - protein, 37 aa, synthetic construct
  REGION 1..37: note = Description of Artificial Sequence: Synthetic polypeptide
HSQGTFTSDYSKYLDSRRAQDFVQWLMNTKRNRNNIA

SEQ ID NO: 784 - skipped

SEQ ID NO: 785 - protein, 29 aa, synthetic construct
  REGION 1..29: note = Description of Artificial Sequence: Synthetic peptide
  MOD_RES 17: note = Lys(N-epsilon-dodecanoyl)
HGQGTFTSDYSKYLDEKAAKEFIAWLLNT

SEQ ID NO: 786 - protein, 29 aa, synthetic construct
  REGION 1..29: note = Description of Artificial Sequence: Synthetic peptide
  MOD_RES 17: note = Lys(N-epsilon-hexacanoyl)
HGQGTFTSDYSKYLDEKAAKEFIAWLLNT

SEQ ID NO: 787 - protein, 29 aa, synthetic construct
  REGION 1..29: note = Description of Artificial Sequence: Synthetic peptide
  MOD_RES 17: note = Lys(N-epsilon-octadecanoyl)
HGQGTFTSDYSKYLDEKAAKEFIAWLLNT

SEQ ID NO: 788 - protein, 29 aa, synthetic construct
  REGION 1..29: note = Description of Artificial Sequence: Synthetic peptide
  MOD_RES 2: note = Aib
  REGION 16..20: note = misc_feature - Cyclic
  MOD_RES 24: note = Lys(N-epsilon(N-epsilon-hexadecanoyl)
HXQGTFTSDYSKYLDEQAAKEFIKWLLNT

SEQ ID NO: 789 - protein, 29 aa, synthetic construct
  REGION 1..29: note = Description of Artificial Sequence: Synthetic peptide
  MOD_RES 2: note = Aib
  REGION 16..20: note = misc_feature - Cyclic
  MOD_RES 24: note = Lys(N-epsilon(N-alpha-octadecanoyl)gamma-glutamyl)
HXQGTFTSDYSKYLDEQAAKEFIKWLLNT

SEQ ID NO: 790 - protein, 29 aa, synthetic construct
  REGION 1..29: note = Description of Artificial Sequence: Synthetic peptide
  MOD_RES 2: note = Aib
  REGION 16..20: note = misc_feature - Cyclic
  MOD_RES 24: note = Lys(N-epsilon(N-alpha-hexadecanoyl)-gamma-glutamyl)
HXQGTFTSDYSKYLDEQAAKEFIKWLLNT

SEQ ID NO: 791 - protein, 29 aa, synthetic construct
  REGION 1..29: note = Description of Artificial Sequence: Synthetic peptide
  MOD_RES 2: note = Aib
  REGION 16..20: note = misc_feature - Cyclic
  MOD_RES 24: note Lys(N-epsilon-(N-alpha-octadecanoyl(N9-gamma-glutamyl (9-amino-4,7-dioxanonanoyl))))
HXQGTFTSDYSKYLDEQAAKEFIKWLLNT

SEQ ID NO: 792 - protein, 29 aa, synthetic construct
  REGION 1..29: note = Description of Artificial Sequence: Synthetic peptide
  MOD_RES 2: note = Aib
  REGION 16..20: note = misc_feature - Cyclic
  MOD_RES 24: note = Lys(N-epsilon(N-alpha-hexadecanoyl(N9-gamma glutamyl (9-amino-4,7-dioxanonanoyl))))
HXQGTFTSDYSKYLDEQAAKEFIKWLLNT

SEQ ID NO: 793 - protein, 29 aa, synthetic construct
  REGION 1..29: note = Description of Artificial Sequence: Synthetic peptide
  MOD_RES 2: note = Aib
  REGION 16..20: note = misc_feature - Cyclic
  MOD_RES 24: note = Cys(S-(3-(PEG4-aminoethylacetamide-cholesterol)
HXQGTFTSDYSKYLDEQAAKEFICWLLNT

SEQ ID NO: 794 - protein, 29 aa, synthetic construct
  REGION 1..29: note = Description of Artificial Sequence: Synthetic peptide
  REGION 16..20: note = misc_feature - Cyclic
  MOD_RES 24: note = Cys(S-(3-(PEG4-aminoethylacetamide-Cholesterol))
HGQGTFTSDYSKYLDEQAAKEFICWLLNT

SEQ ID NO: 795 - protein, 29 aa, synthetic construct
  REGION 1..29: note = Description of Artificial Sequence: Synthetic peptide
  MOD_RES 2: note = Gly or Aib
  MOD_RES 17: note = Any natural or unnatural amino acid comprising a functional group covalently attached to the surfactant X
  MOD_RES 28: note = Asn or Gln
HXQGTFTSDYSKYLDEXAAKEFIQWLLXT

SEQ ID NO: 796 - protein, 29 aa, synthetic construct
  REGION 1..29: note = Description of Artificial Sequence: Synthetic peptide
  MOD_RES 2: note = Aib
  REGION 16..20: note = misc_feature - Cyclic
  MOD_RES 16: note = Lys or Glu cyclized through side chain to form a lactam linkage
  MOD_RES 20: note = Lys or Glu cyclized through side chain to form a lactam linkage
  MOD_RES 24: note = Lys(N-omega-X)
  MOD_RES 28: note = Asn or Gln
HXQGTFTSDYSKYLDXQAAXEFIKWLLXT

SEQ ID NO: 797 - protein, 29 aa, synthetic construct
  REGION 1..29: note = Description of Artificial Sequence: Synthetic peptide
  MOD_RES 2: note = Aib
  REGION 16..20: note = misc_feature - Cyclic
  MOD_RES 16: note = Glu is cyclized through side chain to form a lactam linkage
  MOD_RES 20: note = Lys is cyclized through side chain to form a lactam linkage
  MOD_RES 24: note = Lys(N-omega-X)
  REGION 1..29: note = See specification as filed for detailed description of substitutions and preferred embodiments
HXQGTFTSDYSKYLDEQAAKEFIKWLLQT

SEQ ID NO: 798 - protein, 29 aa, synthetic construct
  REGION 1..29: note = Description of Artificial Sequence: Synthetic peptide
  MOD_RES 2: note = Aib
  REGION 16..20: note = misc_feature - Cyclic
  MOD_RES 16: note = Glu is cyclized through side chain to form a lactam linkage
  MOD_RES 20: note = Lys is cyclized through side chain to form a lactam linkage
  MOD_RES 24: note = Lys(C9)
  REGION 1..29: note = C-term amide
HXQGTFTSDYSKYLDEQAAKEFIKWLLQT

SEQ ID NO: 799 - protein, 29 aa, synthetic construct
  REGION 1..29: note = Description of Artificial Sequence: Synthetic peptide
  MOD_RES 2: note = Aib
  REGION 16..20: note = misc_feature - Cyclic
  MOD_RES 16: note = Glu is cyclized through side chain to form a lactam linkage
  MOD_RES 20: note = Lys is cyclized through side chain to form a lactam linkage
  MOD_RES 24: note = Lys(C10)
  REGION 1..29: note = C-term amide
HXQGTFTSDYSKYLDEQAAKEFIKWLLQT

SEQ ID NO: 800 - protein, 29 aa, synthetic construct
  REGION 1..29: note = Description of Artificial Sequence: Synthetic peptide
  MOD_RES 2: note = Aib
  REGION 16..20: note = misc_feature - Cyclic
  MOD_RES 16: note = Glu is cyclized through side chain to form a lactam linkage
  MOD_RES 20: note = Lys is cyclized through side chain to form a lactam linkage
  MOD_RES 24: note = Lys(C11)
  REGION 1..29: note = C-term amide
HXQGTFTSDYSKYLDEQAAKEFIKWLLQT

SEQ ID NO: 801 - protein, 29 aa, synthetic construct
  REGION 1..29: note = Description of Artificial Sequence: Synthetic peptide
  MOD_RES 2: note = Aib
  REGION 16..20: note = misc_feature - Cyclic
  MOD_RES 16: note = Glu is cyclized through side chain to form a lactam linkage
  MOD_RES 20: note = Lys is cyclized through side chain to form a lactam linkage
  MOD_RES 24: note = Lys(alpha-Me8)
  REGION 1..29: note = C-term amide
HXQGTFTSDYSKYLDEQAAKEFIKWLLQT

SEQ ID NO: 802 - protein, 29 aa, synthetic construct
  REGION 1..29: note = Description of Artificial Sequence: Synthetic peptide
  MOD_RES 2: note = Aib
  REGION 16..20: note = misc_feature - Cyclic
  MOD_RES 16: note = Glu is cyclized through side chain to form a lactam linkage
  MOD_RES 20: note = Lys is cyclized through side chain to form a lactam linkage
  MOD_RES 24: note = Lys(alpha-Me10)
  REGION 1..29: note = C-term amide
HXQGTFTSDYSKYLDEQAAKEFIKWLLQT

SEQ ID NO: 803 - protein, 29 aa, synthetic construct
  REGION 1..29: note = Description of Artificial Sequence: Synthetic peptide
  MOD_RES 2: note = Aib
  REGION 16..20: note = misc_feature - Cyclic
  MOD_RES 16: note = Glu is cyclized through side chain to form a lactam linkage
  MOD_RES 20: note = Lys is cyclized through side chain to form a lactam linkage
  MOD_RES 24: note = Lys(alpha-Me12)
  REGION 1..29: note = C-term amide
HXQGTFTSDYSKYLDEQAAKEFIKWLLQT

SEQ ID NO: 804 - protein, 29 aa, synthetic construct
  REGION 1..29: note = Description of Artificial Sequence: Synthetic peptide
  MOD_RES 2: note = Aib
  REGION 16..20: note = misc_feature - Cyclic
  MOD_RES 16: note = Glu is cyclized through side chain to form a lactam linkage
  MOD_RES 20: note = Lys is cyclized through side chain to form a lactam linkage
  MOD_RES 24: note = Lys(alpha-Me14)
  REGION 1..29: note = C-term amide
HXQGTFTSDYSKYLDEQAAKEFIKWLLQT

SEQ ID NO: 805 - protein, 29 aa, synthetic construct
  REGION 1..29: note = Description of Artificial Sequence: Synthetic peptide
  MOD_RES 2: note = Aib
  REGION 16..20: note = misc_feature - Cyclic
  MOD_RES 16: note = Glu is cyclized through side chain to form a lactam linkage
  MOD_RES 20: note = Lys is cyclized through side chain to form a lactam linkage
  MOD_RES 24: note = Lys(alpha-Me16)
  REGION 1..29: note = C-term amide
HXQGTFTSDYSKYLDEQAAKEFIKWLLQT

SEQ ID NO: 806 - protein, 29 aa, synthetic construct
  REGION 1..29: note = Description of Artificial Sequence: Synthetic peptide
  MOD_RES 2: note = Aib
  REGION 16..20: note = misc_feature - Cyclic
  MOD_RES 16: note = Glu is cyclized through side chain to form a lactam linkage
  MOD_RES 20: note = Lys is cyclized through side chain to form a lactam linkage
  MOD_RES 24: note = Lys(alpha-Me18)
  REGION 1..29: note = C-term amide
HXQGTFTSDYSKYLDEQAAKEFIKWLLQT

SEQ ID NO: 807 - protein, 29 aa, synthetic construct
  REGION 1..29: note = Description of Artificial Sequence: Synthetic peptide
  MOD_RES 2: note = Aib
  REGION 16..20: note = misc_feature - Cyclic
  MOD_RES 16: note = Glu is cyclized through side chain to form a lactam linkage
  MOD_RES 20: note = Lys is cyclized through side chain to form a lactam linkage
  MOD_RES 24: note = Lys(Me10)
  REGION 1..29: note = C-term OH
HXQGTFTSDYSKYLDEQAAKEFIKWLLQT

SEQ ID NO: 808 - protein, 29 aa, synthetic construct
  REGION 1..29: note = Description of Artificial Sequence: Synthetic peptide
  MOD_RES 2: note = Aib
  REGION 16..20: note = misc_feature - Cyclic
  MOD_RES 16: note = Glu is cyclized through side chain to form a lactam linkage
  MOD_RES 20: note = Lys is cyclized through side chain to form a lactam linkage
  MOD_RES 24: note = Lys(Me12)
  REGION 1..29: note = C-term OH
HXQGTFTSDYSKYLDEQAAKEFIKWLLQT

SEQ ID NO: 809 - protein, 29 aa, synthetic construct
  REGION 1..29: note = Description of Artificial Sequence: Synthetic peptide
  MOD_RES 2: note = Aib
  REGION 16..20: note = misc_feature - Cyclic
  MOD_RES 16: note = Glu is cyclized through side chain to form a lactam linkage
  MOD_RES 20: note = Lys is cyclized through side chain to form a lactam linkage
  MOD_RES 24: note = Lys(Me14)
  REGION 1..29: note = C-term OH
HXQGTFTSDYSKYLDEQAAKEFIKWLLQT

SEQ ID NO: 810 - protein, 29 aa, synthetic construct
  REGION 1..29: note = Description of Artificial Sequence: Synthetic peptide
  MOD_RES 2: note = Aib
  REGION 16..20: note = misc_feature - Cyclic
  MOD_RES 16: note = Glu is cyclized through side chain to form a lactam linkage
  MOD_RES 20: note = Lys is cyclized through side chain to form a lactam linkage
  MOD_RES 24: note = Lys(Me16)
  REGION 1..29: note = C-term OH
HXQGTFTSDYSKYLDEQAAKEFIKWLLQT

SEQ ID NO: 811 - protein, 29 aa, synthetic construct
  REGION 1..29: note = Description of Artificial Sequence: Synthetic peptide
  MOD_RES 2: note = Aib
  REGION 16..20: note = misc_feature - Cyclic
  MOD_RES 16: note = Glu is cyclized through side chain to form a lactam linkage
  MOD_RES 20: note = Lys is cyclized through side chain to form a lactam linkage
  MOD_RES 24: note = Lys(Me18)
  REGION 1..29: note = C-term OH
HXQGTFTSDYSKYLDEQAAKEFIKWLLQT

SEQ ID NO: 812 - protein, 29 aa, synthetic construct
  REGION 1..29: note = Description of Artificial Sequence: Synthetic peptide
  MOD_RES 2: note = Aib
  REGION 16..20: note = misc_feature - Cyclic
  MOD_RES 16: note = Glu is cyclized through side chain to form a lactam linkage
  MOD_RES 20: note = Lys is cyclized through side chain to form a lactam linkage
  MOD_RES 24: note = Lys(Me10)
  REGION 1..29: note = C-term OH
HXQGTFTSDYSKYLDEEAAKEFIKWLLQT

SEQ ID NO: 813 - protein, 29 aa, synthetic construct
  REGION 1..29: note = Description of Artificial Sequence: Synthetic peptide
  MOD_RES 2: note = Aib
  REGION 16..20: note = misc_feature - Cyclic
  MOD_RES 16: note = Glu is cyclized through side chain to form a lactam linkage
  MOD_RES 20: note = Lys is cyclized through side chain to form a lactam linkage
  MOD_RES 24: note = Lys(Me12)
  REGION 1..29: note = C-term OH
HXQGTFTSDYSKYLDEEAAKEFIKWLLQT

SEQ ID NO: 814 - protein, 29 aa, synthetic construct
  REGION 1..29: note = Description of Artificial Sequence: Synthetic peptide
  MOD_RES 2: note = Aib
  REGION 16..20: note = misc_feature - Cyclic
  MOD_RES 16: note = Glu is cyclized through side chain to form a lactam linkage
  MOD_RES 20: note = Lys is cyclized through side chain to form a lactam linkage
  MOD_RES 24: note = Lys(Me14)
  REGION 1..29: note = C-term OH
HXQGTFTSDYSKYLDEEAAKEFIKWLLQT

SEQ ID NO: 815 - protein, 29 aa, synthetic construct
  REGION 1..29: note = Description of Artificial Sequence: Synthetic peptide
  MOD_RES 2: note = Aib
  REGION 16..20: note = misc_feature - Cyclic
  MOD_RES 16: note = Glu is cyclized through side chain to form a lactam linkage
  MOD_RES 20: note = Lys is cyclized through side chain to form a lactam linkage
  MOD_RES 24: note = Lys(Me16)
  REGION 1..29: note = C-term OH
HXQGTFTSDYSKYLDEEAAKEFIKWLLQT

SEQ ID NO: 816 - protein, 29 aa, synthetic construct
  REGION 1..29: note = Description of Artificial Sequence: Synthetic peptide
  MOD_RES 2: note = Aib
  REGION 16..20: note = misc_feature - Cyclic
  MOD_RES 16: note = Glu is cyclized through side chain to form a lactam linkage
  MOD_RES 20: note = Lys is cyclized through side chain to form a lactam linkage
  MOD_RES 24: note = Lys(Me18)
  REGION 1..29: note = C-term OH
HXQGTFTSDYSKYLDEEAAKEFIKWLLQT

SEQ ID NO: 817 - protein, 29 aa, synthetic construct
  REGION 1..29: note = Description of Artificial Sequence: Synthetic peptide
  MOD_RES 2: note = Aib
  REGION 16..20: note = misc_feature - Cyclic
  MOD_RES 16: note = Glu is cyclized through side chain to form a lactam linkage
  MOD_RES 17: note = Lys(Me10)
  MOD_RES 20: note = Lys is cyclized through side chain to form a lactam linkage
  REGION 1..29: note = C-term amide
HXQGTFTSDYSKYLDEKAAKEFIQWLLQT

SEQ ID NO: 818 - protein, 29 aa, synthetic construct
  REGION 1..29: note = Description of Artificial Sequence: Synthetic peptide
  MOD_RES 2: note = Aib
  REGION 16..20: note = misc_feature - Cyclic
  MOD_RES 16: note = Glu is cyclized through side chain to form a lactam linkage
  MOD_RES 17: note = Lys(Me12)
  MOD_RES 20: note = Lys is cyclized through side chain to form a lactam linkage
  REGION 1..29: note = C-term amide
HXQGTFTSDYSKYLDEKAAKEFIQWLLQT

SEQ ID NO: 819 - protein, 29 aa, synthetic construct
  REGION 1..29: note = Description of Artificial Sequence: Synthetic peptide
  MOD_RES 2: note = Aib
  REGION 16..20: note = misc_feature - Cyclic
  MOD_RES 16: note = Glu is cyclized through side chain to form a lactam linkage
  MOD_RES 17: note = Lys(Me14)
  MOD_RES 20: note = Lys is cyclized through side chain to form a lactam linkage
  REGION 1..29: note = C-term amide
HXQGTFTSDYSKYLDEKAAKEFIQWLLQT

SEQ ID NO: 820 - protein, 29 aa, synthetic construct
  REGION 1..29: note = Description of Artificial Sequence: Synthetic peptide
  MOD_RES 2: note = Aib
  REGION 16..20: note = misc_feature - Cyclic
  MOD_RES 16: note = Glu is cyclized through side chain to form a lactam linkage
  MOD_RES 17: note = Lys(Me16)
  MOD_RES 20: note = Lys is cyclized through side chain to form a lactam linkage
  REGION 1..29: note = C-term amide
HXQGTFTSDYSKYLDEKAAKEFIQWLLQT

SEQ ID NO: 821 - protein, 29 aa, synthetic construct
  REGION 1..29: note = Description of Artificial Sequence: Synthetic peptide
  MOD_RES 2: note = Aib
  REGION 16..20: note = misc_feature - Cyclic
  MOD_RES 16: note = Glu is cyclized through side chain to form a lactam linkage
  MOD_RES 17: note = Lys(Me18)
  MOD_RES 20: note = Lys is cyclized through side chain to form a lactam linkage
  REGION 1..29: note = C-term amide
HXQGTFTSDYSKYLDEKAAKEFIQWLLQT

SEQ ID NO: 822 - protein, 29 aa, synthetic construct
  REGION 1..29: note = Description of Artificial Sequence: Synthetic peptide
  MOD_RES 2: note = Aib
  REGION 16..20: note = misc_feature - Cyclic
  MOD_RES 16: note = Glu is cyclized through side chain to form a lactam linkage
  MOD_RES 17: note = Lys(Me12)
  MOD_RES 20: note = Lys is cyclized through side chain to form a lactam linkage
  REGION 1..29: note = C-term OH
HXQGTFTSDYSKYLDEKAAKEFIQWLLQT

SEQ ID NO: 823 - protein, 29 aa, synthetic construct
  REGION 1..29: note = Description of Artificial Sequence: Synthetic peptide
  MOD_RES 2: note = Aib
  REGION 16..20: note = misc_feature - Cyclic
  MOD_RES 16: note = Glu is cyclized through side chain to form a lactam linkage
  MOD_RES 17: note = Lys(Me12)
  MOD_RES 20: note = Lys is cyclized through side chain to form a lactam linkage
  REGION 1..29: note = C-term amide
HXQGTFTSDYSKYLDEKAAKEFIEWLLQT

SEQ ID NO: 824 - protein, 29 aa, synthetic construct
  REGION 1..29: note = Description of Artificial Sequence: Synthetic peptide
  MOD_RES 2: note = Aib
  REGION 16..20: note = misc_feature - Cyclic
  MOD_RES 16: note = Glu is cyclized through side chain to form a lactam linkage
  MOD_RES 17: note = Lys(Me12)
  MOD_RES 20: note = Lys is cyclized through side chain to form a lactam linkage
  REGION 1..29: note = C-term OH
HXQGTFTSDYSKYLDEKAAKEFIEWLLQT

SEQ ID NO: 825 - protein, 29 aa, synthetic construct
  REGION 1..29: note = Description of Artificial Sequence: Synthetic peptide
  MOD_RES 2: note = Aib
  MOD_RES 10: note = Lys(Me10)
  REGION 16..20: note = misc_feature - Cyclic
  MOD_RES 16: note = Glu is cyclized through side chain to form a lactam linkage
  MOD_RES 20: note = Lys is cyclized through side chain to form a lactam linkage
  REGION 1..29: note = C-term amide
HXQGTFTSDKSKYLDEQAAKEFIQWLLQT

SEQ ID NO: 826 - protein, 29 aa, synthetic construct
  REGION 1..29: note = Description of Artificial Sequence: Synthetic peptide
  MOD_RES 2: note = Aib
  MOD_RES 10: note = Lys(Me12)
  REGION 16..20: note = misc_feature - Cyclic
  MOD_RES 16: note = Glu is cyclized through side chain to form a lactam linkage
  MOD_RES 20: note = Lys is cyclized through side chain to form a lactam linkage
  REGION 1..29: note = C-term amide
HXQGTFTSDKSKYLDEQAAKEFIQWLLQT

SEQ ID NO: 827 - protein, 29 aa, synthetic construct
  REGION 1..29: note = Description of Artificial Sequence: Synthetic peptide
  MOD_RES 2: note = Aib
  MOD_RES 10: note = Lys(Me14)
  REGION 16..20: note = misc_feature - Cyclic
  MOD_RES 16: note = Glu is cyclized through side chain to form a lactam linkage
  MOD_RES 20: note = Lys is cyclized through side chain to form a lactam linkage
  REGION 1..29: note = C-term amide
HXQGTFTSDKSKYLDEQAAKEFIQWLLQT

SEQ ID NO: 828 - protein, 29 aa, synthetic construct
  REGION 1..29: note = Description of Artificial Sequence: Synthetic peptide
  MOD_RES 2: note = Aib
  MOD_RES 10: note = Lys(Me16)
  REGION 16..20: note = misc_feature - Cyclic
  MOD_RES 16: note = Glu is cyclized through side chain to form a lactam linkage
  MOD_RES 20: note = Lys is cyclized through side chain to form a lactam linkage
  REGION 1..29: note = C-term amide
HXQGTFTSDKSKYLDEQAAKEFIQWLLQT

SEQ ID NO: 829 - protein, 29 aa, synthetic construct
  REGION 1..29: note = Description of Artificial Sequence: Synthetic peptide
  MOD_RES 2: note = Aib
  MOD_RES 10: note = Lys(Me18)
  REGION 16..20: note = misc_feature - Cyclic
  MOD_RES 16: note = Glu is cyclized through side chain to form a lactam linkage
  MOD_RES 20: note = Lys is cyclized through side chain to form a lactam linkage
  REGION 1..29: note = C-term amide
HXQGTFTSDKSKYLDEQAAKEFIQWLLQT

SEQ ID NO: 830 - protein, 29 aa, synthetic construct
  REGION 1..29: note = Description of Artificial Sequence: Synthetic peptide
  MOD_RES 2: note = Aib
  MOD_RES 10: note = Lys(Me12)
  REGION 16..20: note = misc_feature - Cyclic
  MOD_RES 16: note = Glu is cyclized through side chain to form a lactam linkage
  MOD_RES 20: note = Lys is cyclized through side chain to form a lactam linkage
  REGION 1..29: note = C-term amide
HXQGTFTSDKSKYLDEQAAKEFIEWLLQT

SEQ ID NO: 831 - protein, 29 aa, synthetic construct
  REGION 1..29: note = Description of Artificial Sequence: Synthetic peptide
  MOD_RES 2: note = Aib
  MOD_RES 10: note = Lys(Me12)
  REGION 16..20: note = misc_feature - Cyclic
  MOD_RES 16: note = Glu is cyclized through side chain to form a lactam linkage
  MOD_RES 20: note = Lys is cyclized through side chain to form a lactam linkage
  REGION 1..29: note = C-term OH
HXQGTFTSDKSKYLDEQAAKEFIEWLLQT

SEQ ID NO: 832 - protein, 29 aa, synthetic construct
  REGION 1..29: note = Description of Artificial Sequence: Synthetic peptide
  MOD_RES 2: note = Aib
  REGION 16..20: note = misc_feature - Cyclic
  MOD_RES 16: note = Glu is cyclized through side chain to form a lactam linkage
  MOD_RES 20: note = Lys is cyclized through side chain to form a lactam linkage
  MOD_RES 24: note = LysS1(Me10)
  REGION 1..29: note = C-term amide
HXQGTFTSDYSKYLDEQAAKEFIKWLLQT

SEQ ID NO: 833 - protein, 29 aa, synthetic construct
  REGION 1..29: note = Description of Artificial Sequence: Synthetic peptide
  MOD_RES 2: note = Aib
  REGION 16..20: note = misc_feature - Cyclic
  MOD_RES 16: note = Glu is cyclized through side chain to form a lactam linkage
  MOD_RES 20: note = Lys is cyclized through side chain to form a lactam linkage
  MOD_RES 24: note = LysS1(Me12)
  REGION 1..29: note = C-term amide
HXQGTFTSDYSKYLDEQAAKEFIKWLLQT

SEQ ID NO: 834 - protein, 29 aa, synthetic construct
  REGION 1..29: note = Description of Artificial Sequence: Synthetic peptide
  MOD_RES 2: note = Aib
  REGION 16..20: note = misc_feature - Cyclic
  MOD_RES 16: note = Glu is cyclized through side chain to form a lactam linkage
  MOD_RES 20: note = Lys is cyclized through side chain to form a lactam linkage
  MOD_RES 24: note = LysS1(Me14)
  REGION 1..29: note = C-term amide
HXQGTFTSDYSKYLDEQAAKEFIKWLLQT

SEQ ID NO: 835 - protein, 29 aa, synthetic construct
  REGION 1..29: note = Description of Artificial Sequence: Synthetic peptide
  MOD_RES 2: note = Aib
  REGION 16..20: note = misc_feature - Cyclic
  MOD_RES 16: note = Glu is cyclized through side chain to form a lactam linkage
  MOD_RES 20: note = Lys is cyclized through side chain to form a lactam linkage
  MOD_RES 24: note = LysS1(Me16)
  REGION 1..29: note = C-term amide
HXQGTFTSDYSKYLDEQAAKEFIKWLLQT

SEQ ID NO: 836 - protein, 29 aa, synthetic construct
  REGION 1..29: note = Description of Artificial Sequence: Synthetic peptide
  MOD_RES 2: note = Aib
  REGION 16..20: note = misc_feature - Cyclic
  MOD_RES 16: note = Glu is cyclized through side chain to form a lactam linkage
  MOD_RES 20: note = Lys is cyclized through side chain to form a lactam linkage
  MOD_RES 24: note = LysS1(Me18)
  REGION 1..29: note = C-term amide
HXQGTFTSDYSKYLDEQAAKEFIKWLLQT

SEQ ID NO: 837 - protein, 29 aa, synthetic construct
  REGION 1..29: note = Description of Artificial Sequence: Synthetic peptide
  MOD_RES 2: note = Aib
  REGION 16..20: note = misc_feature - Cyclic
  MOD_RES 16: note = Glu is cyclized through side chain to form a lactam linkage
  MOD_RES 20: note = Lys is cyclized through side chain to form a lactam linkage
  MOD_RES 24: note = LysS2(Me10)
  REGION 1..29: note = C-term amide
HXQGTFTSDYSKYLDEQAAKEFIKWLLQT

SEQ ID NO: 838 - protein, 29 aa, synthetic construct
  REGION 1..29: note = Description of Artificial Sequence: Synthetic peptide
  MOD_RES 2: note = Aib
  REGION 16..20: note = misc_feature - Cyclic
  MOD_RES 16: note = Glu is cyclized through side chain to form a lactam linkage
  MOD_RES 20: note = Lys is cyclized through side chain to form a lactam linkage
  MOD_RES 24: note = LysS2(Me12)
  REGION 1..29: note = C-term amide
HXQGTFTSDYSKYLDEQAAKEFIKWLLQT

SEQ ID NO: 839 - protein, 29 aa, synthetic construct
  REGION 1..29: note = Description of Artificial Sequence: Synthetic peptide
  MOD_RES 2: note = Aib
  REGION 16..20: note = misc_feature - Cyclic
  MOD_RES 16: note = Glu is cyclized through side chain to form a lactam linkage
  MOD_RES 20: note = Lys is cyclized through side chain to form a lactam linkage
  MOD_RES 24: note = LysS2(Me14)
  REGION 1..29: note = C-term amide
HXQGTFTSDYSKYLDEQAAKEFIKWLLQT

SEQ ID NO: 840 - protein, 29 aa, synthetic construct
  REGION 1..29: note = Description of Artificial Sequence: Synthetic peptide
  MOD_RES 2: note = Aib
  REGION 16..20: note = misc_feature - Cyclic
  MOD_RES 16: note = Glu is cyclized through side chain to form a lactam linkage
  MOD_RES 20: note = Lys is cyclized through side chain to form a lactam linkage
  MOD_RES 24: note = LysS2(Me16)
  REGION 1..29: note = C-term amide
HXQGTFTSDYSKYLDEQAAKEFIKWLLQT

SEQ ID NO: 841 - protein, 29 aa, synthetic construct
  REGION 1..29: note = Description of Artificial Sequence: Synthetic peptide
  MOD_RES 2: note = Aib
  REGION 16..20: note = misc_feature - Cyclic
  MOD_RES 16: note = Glu is cyclized through side chain to form a lactam linkage
  MOD_RES 20: note = Lys is cyclized through side chain to form a lactam linkage
  MOD_RES 24: note = LysS2(Me18)
  REGION 1..29: note = C-term amide
HXQGTFTSDYSKYLDEQAAKEFIKWLLQT

SEQ ID NO: 842 - protein, 29 aa, synthetic construct
  REGION 1..29: note = Description of Artificial Sequence: Synthetic peptide
  MOD_RES 2: note = Aib
  REGION 16..20: note = misc_feature - Cyclic
  MOD_RES 16: note = Glu is cyclized through side chain to form a lactam linkage
  MOD_RES 20: note = Lys is cyclized through side chain to form a lactam linkage
  MOD_RES 24: note = LysS1(Me10)
  REGION 1..29: note = C-term OH
HXQGTFTSDYSKYLDEQAAKEFIKWLLQT

SEQ ID NO: 843 - protein, 29 aa, synthetic construct
  REGION 1..29: note = Description of Artificial Sequence: Synthetic peptide
  MOD_RES 2: note = Aib
  REGION 16..20: note = misc_feature - Cyclic
  MOD_RES 16: note = Glu is cyclized through side chain to form a lactam linkage
  MOD_RES 20: note = Lys is cyclized through side chain to form a lactam linkage
  MOD_RES 24: note = LysS1(Me12)
  REGION 1..29: note = C-term OH
HXQGTFTSDYSKYLDEQAAKEFIKWLLQT

SEQ ID NO: 844 - protein, 29 aa, synthetic construct
  REGION 1..29: note = Description of Artificial Sequence: Synthetic peptide
  MOD_RES 2: note = Aib
  REGION 16..20: note = misc_feature - Cyclic
  MOD_RES 16: note = Glu is cyclized through side chain to form a lactam linkage
  MOD_RES 20: note = Lys is cyclized through side chain to form a lactam linkage
  MOD_RES 24: note = LysS1(Me14)
  REGION 1..29: note = C-term OH
HXQGTFTSDYSKYLDEQAAKEFIKWLLQT

SEQ ID NO: 845 - protein, 29 aa, synthetic construct
  REGION 1..29: note = Description of Artificial Sequence: Synthetic peptide
  MOD_RES 2: note = Aib
  REGION 16..20: note = misc_feature - Cyclic
  MOD_RES 16: note = Glu is cyclized through side chain to form a lactam linkage
  MOD_RES 20: note = Lys is cyclized through side chain to form a lactam linkage
  MOD_RES 24: note = LysS1(Me16)
  REGION 1..29: note = C-term OH
HXQGTFTSDYSKYLDEQAAKEFIKWLLQT

SEQ ID NO: 846 - protein, 29 aa, synthetic construct
  REGION 1..29: note = Description of Artificial Sequence: Synthetic peptide
  MOD_RES 2: note = Aib
  REGION 16..20: note = misc_feature - Cyclic
  MOD_RES 16: note = Glu is cyclized through side chain to form a lactam linkage
  MOD_RES 20: note = Lys is cyclized through side chain to form a lactam linkage
  MOD_RES 24: note = LysS1(Me18)
  REGION 1..29: note = C-term OH
HXQGTFTSDYSKYLDEQAAKEFIKWLLQT

SEQ ID NO: 847 - protein, 29 aa, synthetic construct
  REGION 1..29: note = Description of Artificial Sequence: Synthetic peptide
  MOD_RES 2: note = Aib
  REGION 16..20: note = misc_feature - Cyclic
  MOD_RES 16: note = Glu is cyclized through side chain to form a lactam linkage
  MOD_RES 20: note = Lys is cyclized through side chain to form a lactam linkage
  MOD_RES 24: note = LysS2(Me10)
  REGION 1..29: note = C-term OH
HXQGTFTSDYSKYLDEQAAKEFIKWLLQT

SEQ ID NO: 848 - protein, 29 aa, synthetic construct
  REGION 1..29: note = Description of Artificial Sequence: Synthetic peptide
  MOD_RES 2: note = Aib
  REGION 16..20: note = misc_feature - Cyclic
  MOD_RES 16: note = Glu is cyclized through side chain to form a lactam linkage
  MOD_RES 20: note = Lys is cyclized through side chain to form a lactam linkage
  MOD_RES 24: note = LysS2(Me12)
  REGION 1..29: note = C-term OH
HXQGTFTSDYSKYLDEQAAKEFIKWLLQT

SEQ ID NO: 849 - protein, 29 aa, synthetic construct
  REGION 1..29: note = Description of Artificial Sequence: Synthetic peptide
  MOD_RES 2: note = Aib
  REGION 16..20: note = misc_feature - Cyclic
  MOD_RES 16: note = Glu is cyclized through side chain to form a lactam linkage
  MOD_RES 20: note = Lys is cyclized through side chain to form a lactam linkage
  MOD_RES 24: note = LysS2(Me14)
  REGION 1..29: note = C-term OH
HXQGTFTSDYSKYLDEQAAKEFIKWLLQT

SEQ ID NO: 850 - protein, 29 aa, synthetic construct
  REGION 1..29: note = Description of Artificial Sequence: Synthetic peptide
  MOD_RES 2: note = Aib
  REGION 16..20: note = misc_feature - Cyclic
  MOD_RES 16: note = Glu is cyclized through side chain to form a lactam linkage
  MOD_RES 20: note = Lys is cyclized through side chain to form a lactam linkage
  MOD_RES 24: note = LysS2(Me16)
  REGION 1..29: note = C-term OH
HXQGTFTSDYSKYLDEQAAKEFIKWLLQT

SEQ ID NO: 851 - protein, 29 aa, synthetic construct
  REGION 1..29: note = Description of Artificial Sequence: Synthetic peptide
  MOD_RES 2: note = Aib
  REGION 16..20: note = misc_feature - Cyclic
  MOD_RES 16: note = Glu is cyclized through side chain to form a lactam linkage
  MOD_RES 20: note = Lys is cyclized through side chain to form a lactam linkage
  MOD_RES 24: note = LysS2(Me18)
  REGION 1..29: note = C-term OH
HXQGTFTSDYSKYLDEQAAKEFIKWLLQT

SEQ ID NO: 852 - protein, 29 aa, synthetic construct
  REGION 1..29: note = Description of Artificial Sequence: Synthetic peptide
  MOD_RES 2: note = Aib
  REGION 16..20: note = misc_feature - Cyclic
  MOD_RES 16: note = Glu is cyclized through side chain to form a lactam linkage
  MOD_RES 20: note = Lys is cyclized through side chain to form a lactam linkage
  MOD_RES 24: note = LysS3(Me12)
  REGION 1..29: note = C-term OH
HXQGTFTSDYSKYLDEQAAKEFIKWLLQT

SEQ ID NO: 853 - protein, 29 aa, synthetic construct
  REGION 1..29: note = Description of Artificial Sequence: Synthetic peptide
  MOD_RES 2: note = Aib
  REGION 16..20: note = misc_feature - Cyclic
  MOD_RES 16: note = Glu is cyclized through side chain to form a lactam linkage
  MOD_RES 20: note = Lys is cyclized through side chain to form a lactam linkage
  MOD_RES 24: note = LysS3(Me10)
  REGION 1..29: note = C-term OH
HXQGTFTSDYSKYLDEQAAKEFIKWLLQT

SEQ ID NO: 854 - protein, 29 aa, synthetic construct
  REGION 1..29: note = Description of Artificial Sequence: Synthetic peptide
  MOD_RES 2: note = Aib
  REGION 16..20: note = misc_feature - Cyclic
  MOD_RES 16: note = Glu is cyclized through side chain to form a lactam linkage
  MOD_RES 20: note = Lys is cyclized through side chain to form a lactam linkage
  MOD_RES 24: note = LysS3(Me14)
  REGION 1..29: note = C-term OH
HXQGTFTSDYSKYLDEQAAKEFIKWLLQT

SEQ ID NO: 855 - protein, 29 aa, synthetic construct
  REGION 1..29: note = Description of Artificial Sequence: Synthetic peptide
  MOD_RES 2: note = Aib
  REGION 16..20: note = misc_feature - Cyclic
  MOD_RES 16: note = Glu is cyclized through side chain to form a lactam linkage
  MOD_RES 20: note = Lys is cyclized through side chain to form a lactam linkage
  MOD_RES 24: note = LysS3(Me16)
  REGION 1..29: note = C-term OH
HXQGTFTSDYSKYLDEQAAKEFIKWLLQT

SEQ ID NO: 856 - protein, 29 aa, synthetic construct
  REGION 1..29: note = Description of Artificial Sequence: Synthetic peptide
  MOD_RES 2: note = Aib
  REGION 16..20: note = misc_feature - Cyclic
  MOD_RES 16: note = Glu is cyclized through side chain to form a lactam linkage
  MOD_RES 20: note = Lys is cyclized through side chain to form a lactam linkage
  MOD_RES 24: note = LysS3(Me18)
  REGION 1..29: note = C-term OH
HXQGTFTSDYSKYLDEQAAKEFIKWLLQT

SEQ ID NO: 857 - protein, 29 aa, synthetic construct
  REGION 1..29: note = Description of Artificial Sequence: Synthetic peptide
  MOD_RES 2: note = Aib
  REGION 16..20: note = misc_feature - Cyclic
  MOD_RES 16: note = Glu is cyclized through side chain to form a lactam linkage
  MOD_RES 20: note = Lys is cyclized through side chain to form a lactam linkage
  MOD_RES 24: note = LysS3(Me10)
  REGION 1..29: note = C-term amide
HXQGTFTSDYSKYLDEQAAKEFIKWLLQT

SEQ ID NO: 858 - protein, 29 aa, synthetic construct
  REGION 1..29: note = Description of Artificial Sequence: Synthetic peptide
  MOD_RES 2: note = Aib
  REGION 16..20: note = misc_feature - Cyclic
  MOD_RES 16: note = Glu is cyclized through side chain to form a lactam linkage
  MOD_RES 20: note = Lys is cyclized through side chain to form a lactam linkage
  MOD_RES 24: note = LysS3(Me12)
  REGION 1..29: note = C-term amide
HXQGTFTSDYSKYLDEQAAKEFIKWLLQT

SEQ ID NO: 859 - protein, 29 aa, synthetic construct
  REGION 1..29: note = Description of Artificial Sequence: Synthetic peptide
  MOD_RES 2: note = Aib
  REGION 16..20: note = misc_feature - Cyclic
  MOD_RES 16: note = Glu is cyclized through side chain to form a lactam linkage
  MOD_RES 20: note = Lys is cyclized through side chain to form a lactam linkage
  MOD_RES 24: note = LysS3(Me14)
  REGION 1..29: note = C-term amide
HXQGTFTSDYSKYLDEQAAKEFIKWLLQT

SEQ ID NO: 860 - protein, 29 aa, synthetic construct
  REGION 1..29: note = Description of Artificial Sequence: Synthetic peptide
  MOD_RES 2: note = Aib
  REGION 16..20: note = misc_feature - Cyclic
  MOD_RES 16: note = Glu is cyclized through side chain to form a lactam linkage
  MOD_RES 20: note = Lys is cyclized through side chain to form a lactam linkage
  MOD_RES 24: note = LysS3(Me16)
  REGION 1..29: note = C-term amide
HXQGTFTSDYSKYLDEQAAKEFIKWLLQT

SEQ ID NO: 861 - protein, 29 aa, synthetic construct
  REGION 1..29: note = Description of Artificial Sequence: Synthetic peptide
  MOD_RES 2: note = Aib
  REGION 16..20: note = misc_feature - Cyclic
  MOD_RES 16: note = Glu is cyclized through side chain to form a lactam linkage
  MOD_RES 20: note = Lys is cyclized through side chain to form a lactam linkage
  MOD_RES 24: note = LysS3(Me18)
  REGION 1..29: note = C-term amide
HXQGTFTSDYSKYLDEQAAKEFIKWLLQT

SEQ ID NO: 862 - protein, 29 aa, synthetic construct
  REGION 1..29: note = Description of Artificial Sequence: Synthetic peptide
  MOD_RES 2: note = Aib
  REGION 16..20: note = misc_feature - Cyclic
  MOD_RES 16: note = Glu is cyclized through side chain to form a lactam linkage
  MOD_RES 20: note = Lys is cyclized through side chain to form a lactam linkage
  MOD_RES 24: note = LysS3(Me18)
  REGION 1..29: note = C-term amide
HXQGTFTSDYSKYLDEQAAKEFIKWLLQT

SEQ ID NO: 863 - protein, 29 aa, synthetic construct
  REGION 1..29: note = Description of Artificial Sequence: Synthetic peptide
  MOD_RES 2: note = Aib
  REGION 16..20: note = misc_feature - Cyclic
  MOD_RES 16: note = Glu is cyclized through side chain to form a lactam linkage
  MOD_RES 20: note = Lys is cyclized through side chain to form a lactam linkage
  MOD_RES 24: note = Lys(Z8)
  REGION 1..29: note = C-term PEGa
HXQGTFTSDYSKYLDEQAAKEFIKWLLQT

SEQ ID NO: 864 - protein, 29 aa, synthetic construct
  REGION 1..29: note = Description of Artificial Sequence: Synthetic peptide
  MOD_RES 2: note = Aib
  REGION 16..20: note = misc_feature - Cyclic
  MOD_RES 16: note = Glu is cyclized through side chain to form a lactam linkage
  MOD_RES 20: note = Lys is cyclized through side chain to form a lactam linkage
  MOD_RES 24: note = Lys(Z10)
  REGION 1..29: note = C-term PEGa
HXQGTFTSDYSKYLDEQAAKEFIKWLLQT

SEQ ID NO: 865 - protein, 29 aa, synthetic construct
  REGION 1..29: note = Description of Artificial Sequence: Synthetic peptide
  MOD_RES 2: note = Aib
  REGION 16..20: note = misc_feature - Cyclic
  MOD_RES 16: note = Glu is cyclized through side chain to form a lactam linkage
  MOD_RES 20: note = Lys is cyclized through side chain to form a lactam linkage
  MOD_RES 24: note = Lys(Z12)
  REGION 1..29: note = C-term PEGa
HXQGTFTSDYSKYLDEQAAKEFIKWLLQT

SEQ ID NO: 866 - protein, 29 aa, synthetic construct
  REGION 1..29: note = Description of Artificial Sequence: Synthetic peptide
  MOD_RES 2: note = Aib
  REGION 16..20: note = misc_feature - Cyclic
  MOD_RES 16: note = Glu is cyclized through side chain to form a lactam linkage
  MOD_RES 20: note = Lys is cyclized through side chain to form a lactam linkage
  MOD_RES 24: note = Lys(Z14)
  REGION 1..29: note = C-term PEGa
HXQGTFTSDYSKYLDEQAAKEFIKWLLQT

SEQ ID NO: 867 - protein, 29 aa, synthetic construct
  REGION 1..29: note = Description of Artificial Sequence: Synthetic peptide
  MOD_RES 2: note = Aib
  REGION 16..20: note = misc_feature - Cyclic
  MOD_RES 16: note = Glu is cyclized through side chain to form a lactam linkage
  MOD_RES 20: note = Lys is cyclized through side chain to form a lactam linkage
  MOD_RES 24: note = Lys(Z16)
  REGION 1..29: note = C-term PEGa
HXQGTFTSDYSKYLDEQAAKEFIKWLLQT

SEQ ID NO: 868 - protein, 29 aa, synthetic construct
  REGION 1..29: note = Description of Artificial Sequence: Synthetic peptide
  MOD_RES 2: note = Aib
  REGION 16..20: note = misc_feature - Cyclic
  MOD_RES 16: note = Glu is cyclized through side chain to form a lactam linkage
  MOD_RES 20: note = Lys is cyclized through side chain to form a lactam linkage
  MOD_RES 24: note = Lys(Z18)
  REGION 1..29: note = C-term PEGa
HXQGTFTSDYSKYLDEQAAKEFIKWLLQT

SEQ ID NO: 869 - protein, 29 aa, synthetic construct
  REGION 1..29: note = Description of Artificial Sequence: Synthetic peptide
  MOD_RES 2: note = Aib
  REGION 16..20: note = misc_feature - Cyclic
  MOD_RES 16: note = Glu is cyclized through side chain to form a lactam linkage
  MOD_RES 20: note = Lys is cyclized through side chain to form a lactam linkage
  MOD_RES 24: note = Lys(Me8)
  REGION 1..29: note = C-term PEGa
HXQGTFTSDYSKYLDEEAAKEFIKWLLQT

SEQ ID NO: 870 - protein, 29 aa, synthetic construct
  REGION 1..29: note = Description of Artificial Sequence: Synthetic peptide
  MOD_RES 2: note = Aib
  REGION 16..20: note = misc_feature - Cyclic
  MOD_RES 16: note = Glu is cyclized through side chain to form a lactam linkage
  MOD_RES 20: note = Lys is cyclized through side chain to form a lactam linkage
  MOD_RES 24: note = Lys(Me10)
  REGION 1..29: note = C-term PEGa
HXQGTFTSDYSKYLDEEAAKEFIKWLLQT

SEQ ID NO: 871 - protein, 29 aa, synthetic construct
  REGION 1..29: note = Description of Artificial Sequence: Synthetic peptide
  MOD_RES 2: note = Aib
  REGION 16..20: note = misc_feature - Cyclic
  MOD_RES 16: note = Glu is cyclized through side chain to form a lactam linkage
  MOD_RES 20: note = Lys is cyclized through side chain to form a lactam linkage
  MOD_RES 24: note = Lys(Me12)
  REGION 1..29: note = C-term PEGa
HXQGTFTSDYSKYLDEEAAKEFIKWLLQT

SEQ ID NO: 872 - protein, 29 aa, synthetic construct
  REGION 1..29: note = Description of Artificial Sequence: Synthetic peptide
  MOD_RES 2: note = Aib
  REGION 16..20: note = misc_feature - Cyclic
  MOD_RES 16: note = Glu is cyclized through side chain to form a lactam linkage
  MOD_RES 20: note = Lys is cyclized through side chain to form a lactam linkage
  MOD_RES 24: note = Lys(Me14)
  REGION 1..29: note = C-term PEGa
HXQGTFTSDYSKYLDEEAAKEFIKWLLQT

SEQ ID NO: 873 - protein, 29 aa, synthetic construct
  REGION 1..29: note = Description of Artificial Sequence: Synthetic peptide
  MOD_RES 2: note = Aib
  REGION 16..20: note = misc_feature - Cyclic
  MOD_RES 16: note = Glu is cyclized through side chain to form a lactam linkage
  MOD_RES 20: note = Lys is cyclized through side chain to form a lactam linkage
  MOD_RES 24: note = Lys(Me16)
  REGION 1..29: note = C-term PEGa
HXQGTFTSDYSKYLDEEAAKEFIKWLLQT

SEQ ID NO: 874 - protein, 29 aa, synthetic construct
  REGION 1..29: note = Description of Artificial Sequence: Synthetic peptide
  MOD_RES 2: note = Aib
  REGION 16..20: note = misc_feature - Cyclic
  MOD_RES 16: note = Glu is cyclized through side chain to form a lactam linkage
  MOD_RES 20: note = Lys is cyclized through side chain to form a lactam linkage
  MOD_RES 24: note = Lys(Me18)
  REGION 1..29: note = C-term PEGa
HXQGTFTSDYSKYLDEEAAKEFIKWLLQT

SEQ ID NO: 875 - protein, 29 aa, synthetic construct
  REGION 1..29: note = Description of Artificial Sequence: Synthetic peptide
  MOD_RES 2: note = Aib
  REGION 16..20: note = misc_feature - Cyclic
  MOD_RES 16: note = Glu is cyclized through side chain to form a lactam linkage
  MOD_RES 20: note = Lys is cyclized through side chain to form a lactam linkage
  MOD_RES 24: note = Lys(Z8)
  REGION 1..29: note = C-term PEGb
HXQGTFTSDYSKYLDEQAAKEFIKWLLQT

SEQ ID NO: 876 - protein, 29 aa, synthetic construct
  REGION 1..29: note = Description of Artificial Sequence: Synthetic peptide
  MOD_RES 2: note = Aib
  REGION 16..20: note = misc_feature - Cyclic
  MOD_RES 16: note = Glu is cyclized through side chain to form a lactam linkage
  MOD_RES 20: note = Lys is cyclized through side chain to form a lactam linkage
  MOD_RES 24: note = Lys(Z10)
  REGION 1..29: note = C-term PEGb
HXQGTFTSDYSKYLDEQAAKEFIKWLLQT

SEQ ID NO: 877 - protein, 29 aa, synthetic construct
  REGION 1..29: note = Description of Artificial Sequence: Synthetic peptide
  MOD_RES 2: note = Aib
  REGION 16..20: note = misc_feature - Cyclic
  MOD_RES 16: note = Glu is cyclized through side chain to form a lactam linkage
  MOD_RES 20: note = Lys is cyclized through side chain to form a lactam linkage
  MOD_RES 24: note = Lys(Z12)
  REGION 1..29: note = C-term PEGb
HXQGTFTSDYSKYLDEQAAKEFIKWLLQT

SEQ ID NO: 878 - protein, 29 aa, synthetic construct
  REGION 1..29: note = Description of Artificial Sequence: Synthetic peptide
  MOD_RES 2: note = Aib
  REGION 16..20: note = misc_feature - Cyclic
  MOD_RES 16: note = Glu is cyclized through side chain to form a lactam linkage
  MOD_RES 20: note = Lys is cyclized through side chain to form a lactam linkage
  MOD_RES 24: note = Lys(Z14)
  REGION 1..29: note = C-term PEGb
HXQGTFTSDYSKYLDEQAAKEFIKWLLQT

SEQ ID NO: 879 - protein, 29 aa, synthetic construct
  REGION 1..29: note = Description of Artificial Sequence: Synthetic peptide
  MOD_RES 2: note = Aib
  REGION 16..20: note = misc_feature - Cyclic
  MOD_RES 16: note = Glu is cyclized through side chain to form a lactam linkage
  MOD_RES 20: note = Lys is cyclized through side chain to form a lactam linkage
  MOD_RES 24: note = Lys(Z16)
  REGION 1..29: note = C-term PEGb
HXQGTFTSDYSKYLDEQAAKEFIKWLLQT

SEQ ID NO: 880 - protein, 29 aa, synthetic construct
  REGION 1..29: note = Description of Artificial Sequence: Synthetic peptide
  MOD_RES 2: note = Aib
  REGION 16..20: note = misc_feature - Cyclic
  MOD_RES 16: note = Glu is cyclized through side chain to form a lactam linkage
  MOD_RES 20: note = Lys is cyclized through side chain to form a lactam linkage
  MOD_RES 24: note = Lys(Z18)
  REGION 1..29: note = C-term PEGb
HXQGTFTSDYSKYLDEQAAKEFIKWLLQT

SEQ ID NO: 881 - protein, 29 aa, synthetic construct
  REGION 1..29: note = Description of Artificial Sequence: Synthetic peptide
  MOD_RES 2: note = Aib
  REGION 16..20: note = misc_feature - Cyclic
  MOD_RES 16: note = Glu is cyclized through side chain to form a lactam linkage
  MOD_RES 20: note = Lys is cyclized through side chain to form a lactam linkage
  MOD_RES 24: note = Lys(Me8)
  REGION 1..29: note = C-term PEGb
HXQGTFTSDYSKYLDEEAAKEFIKWLLQT

SEQ ID NO: 882 - protein, 29 aa, synthetic construct
  REGION 1..29: note = Description of Artificial Sequence: Synthetic peptide
  MOD_RES 2: note = Aib
  REGION 16..20: note = misc_feature - Cyclic
  MOD_RES 16: note = Glu is cyclized through side chain to form a lactam linkage
  MOD_RES 20: note = Lys is cyclized through side chain to form a lactam linkage
  MOD_RES 24: note = Lys(Me10)
  REGION 1..29: note = C-term PEGb
HXQGTFTSDYSKYLDEEAAKEFIKWLLQT

SEQ ID NO: 883 - protein, 29 aa, synthetic construct
  REGION 1..29: note = Description of Artificial Sequence: Synthetic peptide
  MOD_RES 2: note = Aib
  REGION 16..20: note = misc_feature - Cyclic
  MOD_RES 16: note = Glu is cyclized through side chain to form a lactam linkage
  MOD_RES 20: note = Lys is cyclized through side chain to form a lactam linkage
  MOD_RES 24: note = Lys(Me12)
  REGION 1..29: note = C-term PEGb
HXQGTFTSDYSKYLDEEAAKEFIKWLLQT

SEQ ID NO: 884 - protein, 29 aa, synthetic construct
  REGION 1..29: note = Description of Artificial Sequence: Synthetic peptide
  MOD_RES 2: note = Aib
  REGION 16..20: note = misc_feature - Cyclic
  MOD_RES 16: note = Glu is cyclized through side chain to form a lactam linkage
  MOD_RES 20: note = Lys is cyclized through side chain to form a lactam linkage
  MOD_RES 24: note = Lys(Me14)
  REGION 1..29: note = C-term PEGb
HXQGTFTSDYSKYLDEEAAKEFIKWLLQT

SEQ ID NO: 885 - protein, 29 aa, synthetic construct
  REGION 1..29: note = Description of Artificial Sequence: Synthetic peptide
  MOD_RES 2: note = Aib
  REGION 16..20: note = misc_feature - Cyclic
  MOD_RES 16: note = Glu is cyclized through side chain to form a lactam linkage
  MOD_RES 20: note = Lys is cyclized through side chain to form a lactam linkage
  MOD_RES 24: note = Lys(Me16)
  REGION 1..29: note = C-term PEGb
HXQGTFTSDYSKYLDEEAAKEFIKWLLQT

SEQ ID NO: 886 - protein, 29 aa, synthetic construct
  REGION 1..29: note = Description of Artificial Sequence: Synthetic peptide
  MOD_RES 2: note = Aib
  REGION 16..20: note = misc_feature - Cyclic
  MOD_RES 16: note = Glu is cyclized through side chain to form a lactam linkage
  MOD_RES 20: note = Lys is cyclized through side chain to form a lactam linkage
  MOD_RES 24: note = Lys(Me18)
  REGION 1..29: note = C-term PEGb
HXQGTFTSDYSKYLDEEAAKEFIKWLLQT

SEQ ID NO: 887 - protein, 29 aa, synthetic construct
  REGION 1..29: note = Description of Artificial Sequence: Synthetic peptide
  MOD_RES 2: note = Aib
  REGION 16..20: note = misc_feature - Cyclic
  MOD_RES 16: note = Glu is cyclized through side chain to form a lactam linkage
  MOD_RES 20: note = Lys is cyclized through side chain to form a lactam linkage
  MOD_RES 24: note = Lys(Z8)
  REGION 1..29: note = C-term PEGc
HXQGTFTSDYSKYLDEQAAKEFIKWLLQT

SEQ ID NO: 888 - protein, 29 aa, synthetic construct
  REGION 1..29: note = Description of Artificial Sequence: Synthetic peptide
  MOD_RES 2: note = Aib
  REGION 16..20: note = misc_feature - Cyclic
  MOD_RES 16: note = Glu is cyclized through side chain to form a lactam linkage
  MOD_RES 20: note = Lys is cyclized through side chain to form a lactam linkage
  MOD_RES 24: note = Lys(Z10)
  REGION 1..29: note = C-term PEGc
HXQGTFTSDYSKYLDEQAAKEFIKWLLQT

SEQ ID NO: 889 - protein, 29 aa, synthetic construct
  REGION 1..29: note = Description of Artificial Sequence: Synthetic peptide
  MOD_RES 2: note = Aib
  REGION 16..20: note = misc_feature - Cyclic
  MOD_RES 16: note = Glu is cyclized through side chain to form a lactam linkage
  MOD_RES 20: note = Lys is cyclized through side chain to form a lactam linkage
  MOD_RES 24: note = Lys(Z12)
  REGION 1..29: note = C-term PEGc
HXQGTFTSDYSKYLDEQAAKEFIKWLLQT

SEQ ID NO: 890 - protein, 29 aa, synthetic construct
  REGION 1..29: note = Description of Artificial Sequence: Synthetic peptide
  MOD_RES 2: note = Aib
  REGION 16..20: note = misc_feature - Cyclic
  MOD_RES 16: note = Glu is cyclized through side chain to form a lactam linkage
  MOD_RES 20: note = Lys is cyclized through side chain to form a lactam linkage
  MOD_RES 24: note = Lys(Z14)
  REGION 1..29: note = C-term PEGc
HXQGTFTSDYSKYLDEQAAKEFIKWLLQT

SEQ ID NO: 891 - protein, 29 aa, synthetic construct
  REGION 1..29: note = Description of Artificial Sequence: Synthetic peptide
  MOD_RES 2: note = Aib
  REGION 16..20: note = misc_feature - Cyclic
  MOD_RES 16: note = Glu is cyclized through side chain to form a lactam linkage
  MOD_RES 20: note = Lys is cyclized through side chain to form a lactam linkage
  MOD_RES 24: note = Lys(Z16)
  REGION 1..29: note = C-term PEGc
HXQGTFTSDYSKYLDEQAAKEFIKWLLQT

SEQ ID NO: 892 - protein, 29 aa, synthetic construct
  REGION 1..29: note = Description of Artificial Sequence: Synthetic peptide
  MOD_RES 2: note = Aib
  REGION 16..20: note = misc_feature - Cyclic
  MOD_RES 16: note = Glu is cyclized through side chain to form a lactam linkage
  MOD_RES 20: note = Lys is cyclized through side chain to form a lactam linkage
  MOD_RES 24: note = Lys(Z18)
  REGION 1..29: note = C-term PEGc
HXQGTFTSDYSKYLDEQAAKEFIKWLLQT

SEQ ID NO: 893 - protein, 29 aa, synthetic construct
  REGION 1..29: note = Description of Artificial Sequence: Synthetic peptide
  MOD_RES 2: note = Aib
  REGION 16..20: note = misc_feature - Cyclic
  MOD_RES 16: note = Glu is cyclized through side chain to form a lactam linkage
  MOD_RES 20: note = Lys is cyclized through side chain to form a lactam linkage
  MOD_RES 24: note = Lys(Me8)
  REGION 1..29: note = C-term PEGc
HXQGTFTSDYSKYLDEEAAKEFIKWLLQT

SEQ ID NO: 894 - protein, 29 aa, synthetic construct
  REGION 1..29: note = Description of Artificial Sequence: Synthetic peptide
  MOD_RES 2: note = Aib
  REGION 16..20: note = misc_feature - Cyclic
  MOD_RES 16: note = Glu is cyclized through side chain to form a lactam linkage
  MOD_RES 20: note = Lys is cyclized through side chain to form a lactam linkage
  MOD_RES 24: note = Lys(Me10)
  REGION 1..29: note = C-term PEGc
HXQGTFTSDYSKYLDEEAAKEFIKWLLQT

SEQ ID NO: 895 - protein, 29 aa, synthetic construct
  REGION 1..29: note = Description of Artificial Sequence: Synthetic peptide
  MOD_RES 2: note = Aib
  REGION 16..20: note = misc_feature - Cyclic
  MOD_RES 16: note = Glu is cyclized through side chain to form a lactam linkage
  MOD_RES 20: note = Lys is cyclized through side chain to form a lactam linkage
  MOD_RES 24: note = Lys(Me12)
  REGION 1..29: note = C-term PEGc
HXQGTFTSDYSKYLDEEAAKEFIKWLLQT

SEQ ID NO: 896 - protein, 29 aa, synthetic construct
  REGION 1..29: note = Description of Artificial Sequence: Synthetic peptide
  MOD_RES 2: note = Aib
  REGION 16..20: note = misc_feature - Cyclic
  MOD_RES 16: note = Glu is cyclized through side chain to form a lactam linkage
  MOD_RES 20: note = Lys is cyclized through side chain to form a lactam linkage
  MOD_RES 24: note = Lys(Me14)
  REGION 1..29: note = C-term PEGc
HXQGTFTSDYSKYLDEEAAKEFIKWLLQT

SEQ ID NO: 897 - protein, 29 aa, synthetic construct
  REGION 1..29: note = Description of Artificial Sequence: Synthetic peptide
  MOD_RES 2: note = Aib
  REGION 16..20: note = misc_feature - Cyclic
  MOD_RES 16: note = Glu is cyclized through side chain to form a lactam linkage
  MOD_RES 20: note = Lys is cyclized through side chain to form a lactam linkage
  MOD_RES 24: note = Lys(Me16)
  REGION 1..29: note = C-term PEGc
HXQGTFTSDYSKYLDEEAAKEFIKWLLQT

SEQ ID NO: 898 - protein, 29 aa, synthetic construct
  REGION 1..29: note = Description of Artificial Sequence: Synthetic peptide
  MOD_RES 2: note = Aib
  REGION 16..20: note = misc_feature - Cyclic
  MOD_RES 16: note = Glu is cyclized through side chain to form a lactam linkage
  MOD_RES 20: note = Lys is cyclized through side chain to form a lactam linkage
  MOD_RES 24: note = Lys(Me18)
  REGION 1..29: note = C-term PEGc
HXQGTFTSDYSKYLDEEAAKEFIKWLLQT

SEQ ID NO: 899 - protein, 29 aa, synthetic construct
  REGION 1..29: note = Description of Artificial Sequence: Synthetic peptide
  MOD_RES 2: note = Aib
  REGION 16..20: note = misc_feature - Cyclic
  MOD_RES 16: note = Glu is cyclized through side chain to form a lactam linkage
  MOD_RES 20: note = Lys is cyclized through side chain to form a lactam linkage
  MOD_RES 24: note = Lys(Z8)
  REGION 1..29: note = C-term PEGd
HXQGTFTSDYSKYLDEQAAKEFIKWLLQT

SEQ ID NO: 900 - protein, 29 aa, synthetic construct
  REGION 1..29: note = Description of Artificial Sequence: Synthetic peptide
  MOD_RES 2: note = Aib
  REGION 16..20: note = misc_feature - Cyclic
  MOD_RES 16: note = Glu is cyclized through side chain to form a lactam linkage
  MOD_RES 20: note = Lys is cyclized through side chain to form a lactam linkage
  MOD_RES 24: note = Lys(Z10)
  REGION 1..29: note = C-term PEGd
HXQGTFTSDYSKYLDEQAAKEFIKWLLQT

SEQ ID NO: 901 - protein, 29 aa, synthetic construct
  REGION 1..29: note = Description of Artificial Sequence: Synthetic peptide
  MOD_RES 2: note = Aib
  REGION 16..20: note = misc_feature - Cyclic
  MOD_RES 16: note = Glu is cyclized through side chain to form a lactam linkage
  MOD_RES 20: note = Lys is cyclized through side chain to form a lactam linkage
  MOD_RES 24: note = Lys(Z12)
  REGION 1..29: note = C-term PEGd
HXQGTFTSDYSKYLDEQAAKEFIKWLLQT

SEQ ID NO: 902 - protein, 29 aa, synthetic construct
  REGION 1..29: note = Description of Artificial Sequence: Synthetic peptide
  MOD_RES 2: note = Aib
  REGION 16..20: note = misc_feature - Cyclic
  MOD_RES 16: note = Glu is cyclized through side chain to form a lactam linkage
  MOD_RES 20: note = Lys is cyclized through side chain to form a lactam linkage
  MOD_RES 24: note = Lys(Z14)
  REGION 1..29: note = C-term PEGd
HXQGTFTSDYSKYLDEQAAKEFIKWLLQT

SEQ ID NO: 903 - protein, 29 aa, synthetic construct
  REGION 1..29: note = Description of Artificial Sequence: Synthetic peptide
  MOD_RES 2: note = Aib
  REGION 16..20: note = misc_feature - Cyclic
  MOD_RES 16: note = Glu is cyclized through side chain to form a lactam linkage
  MOD_RES 20: note = Lys is cyclized through side chain to form a lactam linkage
  MOD_RES 24: note = Lys(Z16)
  REGION 1..29: note = C-term PEGd
HXQGTFTSDYSKYLDEQAAKEFIKWLLQT

SEQ ID NO: 904 - protein, 29 aa, synthetic construct
  REGION 1..29: note = Description of Artificial Sequence: Synthetic peptide
  MOD_RES 2: note = Aib
  REGION 16..20: note = misc_feature - Cyclic
  MOD_RES 16: note = Glu is cyclized through side chain to form a lactam linkage
  MOD_RES 20: note = Lys is cyclized through side chain to form a lactam linkage
  MOD_RES 24: note = Lys(Z18)
  REGION 1..29: note = C-term PEGd
HXQGTFTSDYSKYLDEQAAKEFIKWLLQT

SEQ ID NO: 905 - protein, 29 aa, synthetic construct
  REGION 1..29: note = Description of Artificial Sequence: Synthetic peptide
  MOD_RES 2: note = Aib
  REGION 16..20: note = misc_feature - Cyclic
  MOD_RES 16: note = Glu is cyclized through side chain to form a lactam linkage
  MOD_RES 20: note = Lys is cyclized through side chain to form a lactam linkage
  MOD_RES 24: note = Lys(Me8)
  REGION 1..29: note = C-term PEGd
HXQGTFTSDYSKYLDEEAAKEFIKWLLQT

SEQ ID NO: 906 - protein, 29 aa, synthetic construct
  REGION 1..29: note = Description of Artificial Sequence: Synthetic peptide
  MOD_RES 2: note = Aib
  REGION 16..20: note = misc_feature - Cyclic
  MOD_RES 16: note = Glu is cyclized through side chain to form a lactam linkage
  MOD_RES 20: note = Lys is cyclized through side chain to form a lactam linkage
  MOD_RES 24: note = Lys(Me10)
  REGION 1..29: note = C-term PEGd
HXQGTFTSDYSKYLDEEAAKEFIKWLLQT

SEQ ID NO: 907 - protein, 29 aa, synthetic construct
  REGION 1..29: note = Description of Artificial Sequence: Synthetic peptide
  MOD_RES 2: note = Aib
  REGION 16..20: note = misc_feature - Cyclic
  MOD_RES 16: note = Glu is cyclized through side chain to form a lactam linkage
  MOD_RES 20: note = Lys is cyclized through side chain to form a lactam linkage
  MOD_RES 24: note = Lys(Me12)
  REGION 1..29: note = C-term PEGd
HXQGTFTSDYSKYLDEEAAKEFIKWLLQT

SEQ ID NO: 908 - protein, 29 aa, synthetic construct
  REGION 1..29: note = Description of Artificial Sequence: Synthetic peptide
  MOD_RES 2: note = Aib
  REGION 16..20: note = misc_feature - Cyclic
  MOD_RES 16: note = Glu is cyclized through side chain to form a lactam linkage
  MOD_RES 20: note = Lys is cyclized through side chain to form a lactam linkage
  MOD_RES 24: note = Lys(Me14)
  REGION 1..29: note = C-term PEGd
HXQGTFTSDYSKYLDEEAAKEFIKWLLQT

SEQ ID NO: 909 - protein, 29 aa, synthetic construct
  REGION 1..29: note = Description of Artificial Sequence: Synthetic peptide
  MOD_RES 2: note = Aib
  REGION 16..20: note = misc_feature - Cyclic
  MOD_RES 16: note = Glu is cyclized through side chain to form a lactam linkage
  MOD_RES 20: note = Lys is cyclized through side chain to form a lactam linkage
  MOD_RES 24: note = Lys(Me16)
  REGION 1..29: note = C-term PEGd
HXQGTFTSDYSKYLDEEAAKEFIKWLLQT

SEQ ID NO: 910 - protein, 29 aa, synthetic construct
  REGION 1..29: note = Description of Artificial Sequence: Synthetic peptide
  MOD_RES 2: note = Aib
  REGION 16..20: note = misc_feature - Cyclic
  MOD_RES 16: note = Glu is cyclized through side chain to form a lactam linkage
  MOD_RES 20: note = Lys is cyclized through side chain to form a lactam linkage
  MOD_RES 24: note = Lys(Me18)
  REGION 1..29: note = C-term PEGd
HXQGTFTSDYSKYLDEEAAKEFIKWLLQT

SEQ ID NO: 911 - protein, 29 aa, synthetic construct
  REGION 1..29: note = Description of Artificial Sequence: Synthetic peptide
  MOD_RES 2: note = Aib
  REGION 16..20: note = misc_feature - Cyclic
  MOD_RES 16: note = Glu is cyclized through side chain to form a lactam linkage
  MOD_RES 20: note = Lys is cyclized through side chain to form a lactam linkage
  MOD_RES 24: note = Lys(Z8)
  REGION 1..29: note = C-term OH
HXQGTFTSDYSKYLDEQAAKEFIKWLLQT

SEQ ID NO: 912 - protein, 29 aa, synthetic construct
  REGION 1..29: note = Description of Artificial Sequence: Synthetic peptide
  MOD_RES 2: note = Aib
  REGION 16..20: note = misc_feature - Cyclic
  MOD_RES 16: note = Glu is cyclized through side chain to form a lactam linkage
  MOD_RES 20: note = Lys is cyclized through side chain to form a lactam linkage
  MOD_RES 24: note = Lys(Z10)
  REGION 1..29: note = C-term OH
HXQGTFTSDYSKYLDEQAAKEFIKWLLQT

SEQ ID NO: 913 - protein, 29 aa, synthetic construct
  REGION 1..29: note = Description of Artificial Sequence: Synthetic peptide
  MOD_RES 2: note = Aib
  REGION 16..20: note = misc_feature - Cyclic
  MOD_RES 16: note = Glu is cyclized through side chain to form a lactam linkage
  MOD_RES 20: note = Lys is cyclized through side chain to form a lactam linkage
  MOD_RES 24: note = Lys(Z12)
  REGION 1..29: note = C-term OH
HXQGTFTSDYSKYLDEQAAKEFIKWLLQT

SEQ ID NO: 914 - protein, 29 aa, synthetic construct
  REGION 1..29: note = Description of Artificial Sequence: Synthetic peptide
  MOD_RES 2: note = Aib
  REGION 16..20: note = misc_feature - Cyclic
  MOD_RES 16: note = Glu is cyclized through side chain to form a lactam linkage
  MOD_RES 20: note = Lys is cyclized through side chain to form a lactam linkage
  MOD_RES 24: note = Lys(Z14)
  REGION 1..29: note = C-term OH
HXQGTFTSDYSKYLDEQAAKEFIKWLLQT

SEQ ID NO: 915 - protein, 29 aa, synthetic construct
  REGION 1..29: note = Description of Artificial Sequence: Synthetic peptide
  MOD_RES 2: note = Aib
  REGION 16..20: note = misc_feature - Cyclic
  MOD_RES 16: note = Glu is cyclized through side chain to form a lactam linkage
  MOD_RES 20: note = Lys is cyclized through side chain to form a lactam linkage
  MOD_RES 24: note = Lys(Z16)
  REGION 1..29: note = C-term OH
HXQGTFTSDYSKYLDEQAAKEFIKWLLQT

SEQ ID NO: 916 - protein, 29 aa, synthetic construct
  REGION 1..29: note = Description of Artificial Sequence: Synthetic peptide
  MOD_RES 2: note = Aib
  REGION 16..20: note = misc_feature - Cyclic
  MOD_RES 16: note = Glu is cyclized through side chain to form a lactam linkage
  MOD_RES 20: note = Lys is cyclized through side chain to form a lactam linkage
  MOD_RES 24: note = Lys(Z18)
  REGION 1..29: note = C-term OH
HXQGTFTSDYSKYLDEQAAKEFIKWLLQT

SEQ ID NO: 917 - protein, 29 aa, synthetic construct
  REGION 1..29: note = Description of Artificial Sequence: Synthetic peptide
  MOD_RES 2: note = Aib
  REGION 16..20: note = misc_feature - Cyclic
  MOD_RES 16: note = Glu is cyclized through side chain to form a lactam linkage
  MOD_RES 20: note = Lys is cyclized through side chain to form a lactam linkage
  MOD_RES 24: note = Lys(Z8)
  REGION 1..29: note = C-term OH
HXQGTFTSDYSKYLDEEAAKEFIKWLLQT

SEQ ID NO: 918 - protein, 29 aa, synthetic construct
  REGION 1..29: note = Description of Artificial Sequence: Synthetic peptide
  MOD_RES 2: note = Aib
  REGION 16..20: note = misc_feature - Cyclic
  MOD_RES 16: note = Glu is cyclized through side chain to form a lactam linkage
  MOD_RES 20: note = Lys is cyclized through side chain to form a lactam linkage
  MOD_RES 24: note = Lys(Z10)
  REGION 1..29: note = C-term OH
HXQGTFTSDYSKYLDEEAAKEFIKWLLQT

SEQ ID NO: 919 - protein, 29 aa, synthetic construct
  REGION 1..29: note = Description of Artificial Sequence: Synthetic peptide
  MOD_RES 2: note = Aib
  REGION 16..20: note = misc_feature - Cyclic
  MOD_RES 16: note = Glu is cyclized through side chain to form a lactam linkage
  MOD_RES 20: note = Lys is cyclized through side chain to form a lactam linkage
  MOD_RES 24: note = Lys(Z12)
  REGION 1..29: note = C-term OH
HXQGTFTSDYSKYLDEEAAKEFIKWLLQT

SEQ ID NO: 920 - protein, 29 aa, synthetic construct
  REGION 1..29: note = Description of Artificial Sequence: Synthetic peptide
  MOD_RES 2: note = Aib
  REGION 16..20: note = misc_feature - Cyclic
  MOD_RES 16: note = Glu is cyclized through side chain to form a lactam linkage
  MOD_RES 20: note = Lys is cyclized through side chain to form a lactam linkage
  MOD_RES 24: note = Lys(Z14)
  REGION 1..29: note = C-term OH
HXQGTFTSDYSKYLDEEAAKEFIKWLLQT

SEQ ID NO: 921 - protein, 29 aa, synthetic construct
  REGION 1..29: note = Description of Artificial Sequence: Synthetic peptide
  MOD_RES 2: note = Aib
  REGION 16..20: note = misc_feature - Cyclic
  MOD_RES 16: note = Glu is cyclized through side chain to form a lactam linkage
  MOD_RES 20: note = Lys is cyclized through side chain to form a lactam linkage
  MOD_RES 24: note = Lys(Z16)
  REGION 1..29: note = C-term OH
HXQGTFTSDYSKYLDEEAAKEFIKWLLQT

SEQ ID NO: 922 - protein, 29 aa, synthetic construct
  REGION 1..29: note = Description of Artificial Sequence: Synthetic peptide
  MOD_RES 2: note = Aib
  REGION 16..20: note = misc_feature - Cyclic
  MOD_RES 16: note = Glu is cyclized through side chain to form a lactam linkage
  MOD_RES 20: note = Lys is cyclized through side chain to form a lactam linkage
  MOD_RES 24: note = Lys(Z18)
  REGION 1..29: note = C-term OH
HXQGTFTSDYSKYLDEEAAKEFIKWLLQT

SEQ ID NO: 923 - protein, 29 aa, synthetic construct
  REGION 1..29: note = Description of Artificial Sequence: Synthetic peptide
  MOD_RES 2: note = Aib
  REGION 16..20: note = misc_feature - Cyclic
  MOD_RES 16: note = Glu is cyclized through side chain to form a lactam linkage
  MOD_RES 20: note = Lys is cyclized through side chain to form a lactam linkage
  MOD_RES 24: note = LysS1(Z8)
  REGION 1..29: note = C-term OH
HXQGTFTSDYSKYLDEQAAKEFIKWLLQT

SEQ ID NO: 924 - protein, 29 aa, synthetic construct
  REGION 1..29: note = Description of Artificial Sequence: Synthetic peptide
  MOD_RES 2: note = Aib
  REGION 16..20: note = misc_feature - Cyclic
  MOD_RES 16: note = Glu is cyclized through side chain to form a lactam linkage
  MOD_RES 20: note = Lys is cyclized through side chain to form a lactam linkage
  MOD_RES 24: note = LysS1(Z10)
  REGION 1..29: note = C-term OH
HXQGTFTSDYSKYLDEQAAKEFIKWLLQT

SEQ ID NO: 925 - protein, 29 aa, synthetic construct
  REGION 1..29: note = Description of Artificial Sequence: Synthetic peptide
  MOD_RES 2: note = Aib
  REGION 16..20: note = misc_feature - Cyclic
  MOD_RES 16: note = Glu is cyclized through side chain to form a lactam linkage
  MOD_RES 20: note = Lys is cyclized through side chain to form a lactam linkage
  MOD_RES 24: note = LysS1(Z12)
  REGION 1..29: note = C-term OH
HXQGTFTSDYSKYLDEQAAKEFIKWLLQT

SEQ ID NO: 926 - protein, 29 aa, synthetic construct
  REGION 1..29: note = Description of Artificial Sequence: Synthetic peptide
  MOD_RES 2: note = Aib
  REGION 16..20: note = misc_feature - Cyclic
  MOD_RES 16: note = Glu is cyclized through side chain to form a lactam linkage
  MOD_RES 20: note = Lys is cyclized through side chain to form a lactam linkage
  MOD_RES 24: note = LysS1(Z14)
  REGION 1..29: note = C-term OH
HXQGTFTSDYSKYLDEQAAKEFIKWLLQT

SEQ ID NO: 927 - protein, 29 aa, synthetic construct
  REGION 1..29: note = Description of Artificial Sequence: Synthetic peptide
  MOD_RES 2: note = Aib
  REGION 16..20: note = misc_feature - Cyclic
  MOD_RES 16: note = Glu is cyclized through side chain to form a lactam linkage
  MOD_RES 20: note = Lys is cyclized through side chain to form a lactam linkage
  MOD_RES 24: note = LysS1(Z16)
  REGION 1..29: note = C-term OH
HXQGTFTSDYSKYLDEQAAKEFIKWLLQT

SEQ ID NO: 928 - protein, 29 aa, synthetic construct
  REGION 1..29: note = Description of Artificial Sequence: Synthetic peptide
  MOD_RES 2: note = Aib
  REGION 16..20: note = misc_feature - Cyclic
  MOD_RES 16: note = Glu is cyclized through side chain to form a lactam linkage
  MOD_RES 20: note = Lys is cyclized through side chain to form a lactam linkage
  MOD_RES 24: note = LysS1(Z18)
  REGION 1..29: note = C-term OH
HXQGTFTSDYSKYLDEQAAKEFIKWLLQT

SEQ ID NO: 929 - protein, 29 aa, synthetic construct
  REGION 1..29: note = Description of Artificial Sequence: Synthetic peptide
  MOD_RES 2: note = Aib
  REGION 16..20: note = misc_feature - Cyclic
  MOD_RES 16: note = Glu is cyclized through side chain to form a lactam linkage
  MOD_RES 20: note = Lys is cyclized through side chain to form a lactam linkage
  MOD_RES 24: note = LysS2(Z8)
  REGION 1..29: note = C-term OH
HXQGTFTSDYSKYLDEQAAKEFIKWLLQT

SEQ ID NO: 930 - protein, 29 aa, synthetic construct
  REGION 1..29: note = Description of Artificial Sequence: Synthetic peptide
  MOD_RES 2: note = Aib
  REGION 16..20: note = misc_feature - Cyclic
  MOD_RES 16: note = Glu is cyclized through side chain to form a lactam linkage
  MOD_RES 20: note = Lys is cyclized through side chain to form a lactam linkage
  MOD_RES 24: note = LysS2(Z10)
  REGION 1..29: note = C-term OH
HXQGTFTSDYSKYLDEQAAKEFIKWLLQT

SEQ ID NO: 931 - protein, 29 aa, synthetic construct
  REGION 1..29: note = Description of Artificial Sequence: Synthetic peptide
  MOD_RES 2: note = Aib
  REGION 16..20: note = misc_feature - Cyclic
  MOD_RES 16: note = Glu is cyclized through side chain to form a lactam linkage
  MOD_RES 20: note = Lys is cyclized through side chain to form a lactam linkage
  MOD_RES 24: note = LysS2(Z12)
  REGION 1..29: note = C-term OH
HXQGTFTSDYSKYLDEQAAKEFIKWLLQT

SEQ ID NO: 932 - protein, 29 aa, synthetic construct
  REGION 1..29: note = Description of Artificial Sequence: Synthetic peptide
  MOD_RES 2: note = Aib
  REGION 16..20: note = misc_feature - Cyclic
  MOD_RES 16: note = Glu is cyclized through side chain to form a lactam linkage
  MOD_RES 20: note = Lys is cyclized through side chain to form a lactam linkage
  MOD_RES 24: note = LysS2(Z14)
  REGION 1..29: note = C-term OH
HXQGTFTSDYSKYLDEQAAKEFIKWLLQT

SEQ ID NO: 933 - protein, 29 aa, synthetic construct
  REGION 1..29: note = Description of Artificial Sequence: Synthetic peptide
  MOD_RES 2: note = Aib
  REGION 16..20: note = misc_feature - Cyclic
  MOD_RES 16: note = Glu is cyclized through side chain to form a lactam linkage
  MOD_RES 20: note = Lys is cyclized through side chain to form a lactam linkage
  MOD_RES 24: note = LysS2(Z16)
  REGION 1..29: note = C-term OH
HXQGTFTSDYSKYLDEQAAKEFIKWLLQT

SEQ ID NO: 934 - protein, 29 aa, synthetic construct
  REGION 1..29: note = Description of Artificial Sequence: Synthetic peptide
  MOD_RES 2: note = Aib
  REGION 16..20: note = misc_feature - Cyclic
  MOD_RES 16: note = Glu is cyclized through side chain to form a lactam linkage
  MOD_RES 20: note = Lys is cyclized through side chain to form a lactam linkage
  MOD_RES 24: note = LysS2(Z18)
  REGION 1..29: note = C-term OH
HXQGTFTSDYSKYLDEQAAKEFIKWLLQT

SEQ ID NO: 935 - protein, 29 aa, synthetic construct
  REGION 1..29: note = Description of Artificial Sequence: Synthetic peptide
  MOD_RES 2: note = Aib
  REGION 16..20: note = misc_feature - Cyclic
  MOD_RES 16: note = Glu is cyclized through side chain to form a lactam linkage
  MOD_RES 20: note = Lys is cyclized through side chain to form a lactam linkage
  MOD_RES 24: note = LysS3(Z8)
  REGION 1..29: note = C-term OH
HXQGTFTSDYSKYLDEQAAKEFIKWLLQT

SEQ ID NO: 936 - protein, 29 aa, synthetic construct
  REGION 1..29: note = Description of Artificial Sequence: Synthetic peptide
  MOD_RES 2: note = Aib
  REGION 16..20: note = misc_feature - Cyclic
  MOD_RES 16: note = Glu is cyclized through side chain to form a lactam linkage
  MOD_RES 20: note = Lys is cyclized through side chain to form a lactam linkage
  MOD_RES 24: note = LysS3(Z10)
  REGION 1..29: note = C-term OH
HXQGTFTSDYSKYLDEQAAKEFIKWLLQT

SEQ ID NO: 937 - protein, 29 aa, synthetic construct
  REGION 1..29: note = Description of Artificial Sequence: Synthetic peptide
  MOD_RES 2: note = Aib
  REGION 16..20: note = misc_feature - Cyclic
  MOD_RES 16: note = Glu is cyclized through side chain to form a lactam linkage
  MOD_RES 20: note = Lys is cyclized through side chain to form a lactam linkage
  MOD_RES 24: note = LysS3(Z12)
  REGION 1..29: note = C-term OH
HXQGTFTSDYSKYLDEQAAKEFIKWLLQT

SEQ ID NO: 938 - protein, 29 aa, synthetic construct
  REGION 1..29: note = Description of Artificial Sequence: Synthetic peptide
  MOD_RES 2: note = Aib
  REGION 16..20: note = misc_feature - Cyclic
  MOD_RES 16: note = Glu is cyclized through side chain to form a lactam linkage
  MOD_RES 20: note = Lys is cyclized through side chain to form a lactam linkage
  MOD_RES 24: note = LysS3(Z14)
  REGION 1..29: note = C-term OH
HXQGTFTSDYSKYLDEQAAKEFIKWLLQT

SEQ ID NO: 939 - protein, 29 aa, synthetic construct
  REGION 1..29: note = Description of Artificial Sequence: Synthetic peptide
  MOD_RES 2: note = Aib
  REGION 16..20: note = misc_feature - Cyclic
  MOD_RES 16: note = Glu is cyclized through side chain to form a lactam linkage
  MOD_RES 20: note = Lys is cyclized through side chain to form a lactam linkage
  MOD_RES 24: note = LysS3(Z16)
  REGION 1..29: note = C-term OH
HXQGTFTSDYSKYLDEQAAKEFIKWLLQT

SEQ ID NO: 940 - protein, 29 aa, synthetic construct
  REGION 1..29: note = Description of Artificial Sequence: Synthetic peptide
  MOD_RES 2: note = Aib
  REGION 16..20: note = misc_feature - Cyclic
  MOD_RES 16: note = Glu is cyclized through side chain to form a lactam linkage
  MOD_RES 20: note = Lys is cyclized through side chain to form a lactam linkage
  MOD_RES 24: note = LysS3(Z18)
  REGION 1..29: note = C-term OH
HXQGTFTSDYSKYLDEQAAKEFIKWLLQT

SEQ ID NO: 941 - protein, 29 aa, synthetic construct
  REGION 1..29: note = Description of Artificial Sequence: Synthetic peptide
  MOD_RES 2: note = Aib
  REGION 16..20: note = misc_feature - Cyclic
  MOD_RES 16: note = Glu is cyclized through side chain to form a lactam linkage
  MOD_RES 20: note = Lys is cyclized through side chain to form a lactam linkage
  MOD_RES 24: note = LysS1(Z8)
  REGION 1..29: note = C-term amide
HXQGTFTSDYSKYLDEQAAKEFIKWLLQT

SEQ ID NO: 942 - protein, 29 aa, synthetic construct
  REGION 1..29: note = Description of Artificial Sequence: Synthetic peptide
  MOD_RES 2: note = Aib
  REGION 16..20: note = misc_feature - Cyclic
  MOD_RES 16: note = Glu is cyclized through side chain to form a lactam linkage
  MOD_RES 20: note = Lys is cyclized through side chain to form a lactam linkage
  MOD_RES 24: note = LysS1(Z10)
  REGION 1..29: note = C-term amide
HXQGTFTSDYSKYLDEQAAKEFIKWLLQT

SEQ ID NO: 943 - protein, 29 aa, synthetic construct
  REGION 1..29: note = Description of Artificial Sequence: Synthetic peptide
  MOD_RES 2: note = Aib
  REGION 16..20: note = misc_feature - Cyclic
  MOD_RES 16: note = Glu is cyclized through side chain to form a lactam linkage
  MOD_RES 20: note = Lys is cyclized through side chain to form a lactam linkage
  MOD_RES 24: note = LysS1(Z12)
  REGION 1..29: note = C-term amide
HXQGTFTSDYSKYLDEQAAKEFIKWLLQT

SEQ ID NO: 944 - protein, 29 aa, synthetic construct
  REGION 1..29: note = Description of Artificial Sequence: Synthetic peptide
  MOD_RES 2: note = Aib
  REGION 16..20: note = misc_feature - Cyclic
  MOD_RES 16: note = Glu is cyclized through side chain to form a lactam linkage
  MOD_RES 20: note = Lys is cyclized through side chain to form a lactam linkage
  MOD_RES 24: note = LysS1(Z14)
  REGION 1..29: note = C-term amide
HXQGTFTSDYSKYLDEQAAKEFIKWLLQT

SEQ ID NO: 945 - protein, 29 aa, synthetic construct
  REGION 1..29: note = Description of Artificial Sequence: Synthetic peptide
  MOD_RES 2: note = Aib
  REGION 16..20: note = misc_feature - Cyclic
  MOD_RES 16: note = Glu is cyclized through side chain to form a lactam linkage
  MOD_RES 20: note = Lys is cyclized through side chain to form a lactam linkage
  MOD_RES 24: note = LysS1(Z16)
  REGION 1..29: note = C-term amide
HXQGTFTSDYSKYLDEQAAKEFIKWLLQT

SEQ ID NO: 946 - protein, 29 aa, synthetic construct
  REGION 1..29: note = Description of Artificial Sequence: Synthetic peptide
  MOD_RES 2: note = Aib
  REGION 16..20: note = misc_feature - Cyclic
  MOD_RES 16: note = Glu is cyclized through side chain to form a lactam linkage
  MOD_RES 20: note = Lys is cyclized through side chain to form a lactam linkage
  MOD_RES 24: note = LysS1(Z18)
  REGION 1..29: note = C-term amide
HXQGTFTSDYSKYLDEQAAKEFIKWLLQT

SEQ ID NO: 947 - protein, 29 aa, synthetic construct
  REGION 1..29: note = Description of Artificial Sequence: Synthetic peptide
  MOD_RES 2: note = Aib
  REGION 16..20: note = misc_feature - Cyclic
  MOD_RES 16: note = Glu is cyclized through side chain to form a lactam linkage
  MOD_RES 20: note = Lys is cyclized through side chain to form a lactam linkage
  MOD_RES 24: note = LysS2(Z8)
  REGION 1..29: note = C-term amide
HXQGTFTSDYSKYLDEQAAKEFIKWLLQT

SEQ ID NO: 948 - protein, 29 aa, synthetic construct
  REGION 1..29: note = Description of Artificial Sequence: Synthetic peptide
  MOD_RES 2: note = Aib
  REGION 16..20: note = misc_feature - Cyclic
  MOD_RES 16: note = Glu is cyclized through side chain to form a lactam linkage
  MOD_RES 20: note = Lys is cyclized through side chain to form a lactam linkage
  MOD_RES 24: note = LysS2(Z10)
  REGION 1..29: note = C-term amide
HXQGTFTSDYSKYLDEQAAKEFIKWLLQT

SEQ ID NO: 949 - protein, 29 aa, synthetic construct
  REGION 1..29: note = Description of Artificial Sequence: Synthetic peptide
  MOD_RES 2: note = Aib
  REGION 16..20: note = misc_feature - Cyclic
  MOD_RES 16: note = Glu is cyclized through side chain to form a lactam linkage
  MOD_RES 20: note = Lys is cyclized through side chain to form a lactam linkage
  MOD_RES 24: note = LysS2(Z12)
  REGION 1..29: note = C-term amide
HXQGTFTSDYSKYLDEQAAKEFIKWLLQT

SEQ ID NO: 950 - protein, 29 aa, synthetic construct
  REGION 1..29: note = Description of Artificial Sequence: Synthetic peptide
  MOD_RES 2: note = Aib
  REGION 16..20: note = misc_feature - Cyclic
  MOD_RES 16: note = Glu is cyclized through side chain to form a lactam linkage
  MOD_RES 20: note = Lys is cyclized through side chain to form a lactam linkage
  MOD_RES 24: note = LysS2(Z14)
  REGION 1..29: note = C-term amide
HXQGTFTSDYSKYLDEQAAKEFIKWLLQT

SEQ ID NO: 951 - protein, 29 aa, synthetic construct
  REGION 1..29: note = Description of Artificial Sequence: Synthetic peptide
  MOD_RES 2: note = Aib
  REGION 16..20: note = misc_feature - Cyclic
  MOD_RES 16: note = Glu is cyclized through side chain to form a lactam linkage
  MOD_RES 20: note = Lys is cyclized through side chain to form a lactam linkage
  MOD_RES 24: note = LysS2(Z16)
  REGION 1..29: note = C-term amide
HXQGTFTSDYSKYLDEQAAKEFIKWLLQT

SEQ ID NO: 952 - protein, 29 aa, synthetic construct
  REGION 1..29: note = Description of Artificial Sequence: Synthetic peptide
  MOD_RES 2: note = Aib
  REGION 16..20: note = misc_feature - Cyclic
  MOD_RES 16: note = Glu is cyclized through side chain to form a lactam linkage
  MOD_RES 20: note = Lys is cyclized through side chain to form a lactam linkage
  MOD_RES 24: note = LysS2(Z18)
  REGION 1..29: note = C-term amide
HXQGTFTSDYSKYLDEQAAKEFIKWLLQT

SEQ ID NO: 953 - protein, 29 aa, synthetic construct
  REGION 1..29: note = Description of Artificial Sequence: Synthetic peptide
  MOD_RES 2: note = Aib
  REGION 16..20: note = misc_feature - Cyclic
  MOD_RES 16: note = Glu is cyclized through side chain to form a lactam linkage
  MOD_RES 20: note = Lys is cyclized through side chain to form a lactam linkage
  MOD_RES 24: note = LysS3(Z8)
  REGION 1..29: note = C-term amide
HXQGTFTSDYSKYLDEQAAKEFIKWLLQT

SEQ ID NO: 954 - protein, 29 aa, synthetic construct
  REGION 1..29: note = Description of Artificial Sequence: Synthetic peptide
  MOD_RES 2: note = Aib
  REGION 16..20: note = misc_feature - Cyclic
  MOD_RES 16: note = Glu is cyclized through side chain to form a lactam linkage
  MOD_RES 20: note = Lys is cyclized through side chain to form a lactam linkage
  MOD_RES 24: note = LysS3(Z10)
  REGION 1..29: note = C-term amide
HXQGTFTSDYSKYLDEQAAKEFIKWLLQT

SEQ ID NO: 955 - protein, 29 aa, synthetic construct
  REGION 1..29: note = Description of Artificial Sequence: Synthetic peptide
  MOD_RES 2: note = Aib
  REGION 16..20: note = misc_feature - Cyclic
  MOD_RES 16: note = Glu is cyclized through side chain to form a lactam linkage
  MOD_RES 20: note = Lys is cyclized through side chain to form a lactam linkage
  MOD_RES 24: note = LysS3(Z12)
  REGION 1..29: note = C-term amide
HXQGTFTSDYSKYLDEQAAKEFIKWLLQT

SEQ ID NO: 956 - protein, 29 aa, synthetic construct
  REGION 1..29: note = Description of Artificial Sequence: Synthetic peptide
  MOD_RES 2: note = Aib
  REGION 16..20: note = misc_feature - Cyclic
  MOD_RES 16: note = Glu is cyclized through side chain to form a lactam linkage
  MOD_RES 20: note = Lys is cyclized through side chain to form a lactam linkage
  MOD_RES 24: note = LysS3(Z14)
  REGION 1..29: note = C-term amide
HXQGTFTSDYSKYLDEQAAKEFIKWLLQT

SEQ ID NO: 957 - protein, 29 aa, synthetic construct
  REGION 1..29: note = Description of Artificial Sequence: Synthetic peptide
  MOD_RES 2: note = Aib
  REGION 16..20: note = misc_feature - Cyclic
  MOD_RES 16: note = Glu is cyclized through side chain to form a lactam linkage
  MOD_RES 20: note = Lys is cyclized through side chain to form a lactam linkage
  MOD_RES 24: note = LysS3(Z16)
  REGION 1..29: note = C-term amide
HXQGTFTSDYSKYLDEQAAKEFIKWLLQT

SEQ ID NO: 958 - protein, 29 aa, synthetic construct
  REGION 1..29: note = Description of Artificial Sequence: Synthetic peptide
  MOD_RES 2: note = Aib
  REGION 16..20: note = misc_feature - Cyclic
  MOD_RES 16: note = Glu is cyclized through side chain to form a lactam linkage
  MOD_RES 20: note = Lys is cyclized through side chain to form a lactam linkage
  MOD_RES 24: note = LysS3(Z18)
  REGION 1..29: note = C-term amide
HXQGTFTSDYSKYLDEQAAKEFIKWLLQT

SEQ ID NO: 959 - protein, 29 aa, synthetic construct
  REGION 1..29: note = Description of Artificial Sequence: Synthetic peptide
  MOD_RES 2: note = Aib
  REGION 10..14: note = misc_feature - Cyclic
  MOD_RES 10: note = Glu is cyclized through side chain to form a lactam linkage
  MOD_RES 14: note = Lys is cyclized through side chain to form a lactam linkage
  MOD_RES 20: note = Lys(Me10)
  REGION 1..29: note = C-term amide
HXQGTFTSDESKYKDSQAAKEFIQWLLQT

SEQ ID NO: 960 - protein, 29 aa, synthetic construct
  REGION 1..29: note = Description of Artificial Sequence: Synthetic peptide
  MOD_RES 2: note = Aib
  REGION 10..14: note = misc_feature - Cyclic
  MOD_RES 10: note = Glu is cyclized through side chain to form a lactam linkage
  MOD_RES 14: note = Lys is cyclized through side chain to form a lactam linkage
  MOD_RES 20: note = Lys(Me12)
  REGION 1..29: note = C-term amide
HXQGTFTSDESKYKDSQAAKEFIQWLLQT

SEQ ID NO: 961 - protein, 29 aa, synthetic construct
  REGION 1..29: note = Description of Artificial Sequence: Synthetic peptide
  MOD_RES 2: note = Aib
  REGION 10..14: note = misc_feature - Cyclic
  MOD_RES 10: note = Glu is cyclized through side chain to form a lactam linkage
  MOD_RES 14: note = Lys is cyclized through side chain to form a lactam linkage
  MOD_RES 20: note = Lys(Me14)
  REGION 1..29: note = C-term amide
HXQGTFTSDESKYKDSQAAKEFIQWLLQT

SEQ ID NO: 962 - protein, 29 aa, synthetic construct
  REGION 1..29: note = Description of Artificial Sequence: Synthetic peptide
  MOD_RES 2: note = Aib
  REGION 10..14: note = misc_feature - Cyclic
  MOD_RES 10: note = Glu is cyclized through side chain to form a lactam linkage
  MOD_RES 14: note = Lys is cyclized through side chain to form a lactam linkage
  MOD_RES 20: note = Lys(Me16)
  REGION 1..29: note = C-term amide
HXQGTFTSDESKYKDSQAAKEFIQWLLQT

SEQ ID NO: 963 - protein, 29 aa, synthetic construct
  REGION 1..29: note = Description of Artificial Sequence: Synthetic peptide
  MOD_RES 2: note = Aib
  REGION 10..14: note = misc_feature - Cyclic
  MOD_RES 10: note = Glu is cyclized through side chain to form a lactam linkage
  MOD_RES 14: note = Lys is cyclized through side chain to form a lactam linkage
  MOD_RES 20: note = Lys(Me18)
  REGION 1..29: note = C-term amide
HXQGTFTSDESKYKDSQAAKEFIQWLLQT

SEQ ID NO: 964 - protein, 29 aa, synthetic construct
  REGION 1..29: note = Description of Artificial Sequence: Synthetic peptide
  MOD_RES 2: note = Aib
  REGION 10..14: note = misc_feature - Cyclic
  MOD_RES 10: note = Glu is cyclized through side chain to form a lactam linkage
  MOD_RES 14: note = Lys is cyclized through side chain to form a lactam linkage
  MOD_RES 20: note = Lys(Z10)
  REGION 1..29: note = C-term amide
HXQGTFTSDESKYKDSQAAKEFIQWLLQT

SEQ ID NO: 965 - protein, 29 aa, synthetic construct
  REGION 1..29: note = Description of Artificial Sequence: Synthetic peptide
  MOD_RES 2: note = Aib
  REGION 10..14: note = misc_feature - Cyclic
  MOD_RES 10: note = Glu is cyclized through side chain to form a lactam linkage
  MOD_RES 14: note = Lys is cyclized through side chain to form a lactam linkage
  MOD_RES 20: note = Lys(Z12)
  REGION 1..29: note = C-term amide
HXQGTFTSDESKYKDSQAAKEFIQWLLQT

SEQ ID NO: 966 - protein, 29 aa, synthetic construct
  REGION 1..29: note = Description of Artificial Sequence: Synthetic peptide
  MOD_RES 2: note = Aib
  REGION 10..14: note = misc_feature - Cyclic
  MOD_RES 10: note = Glu is cyclized through side chain to form a lactam linkage
  MOD_RES 14: note = Lys is cyclized through side chain to form a lactam linkage
  MOD_RES 20: note = Lys(Z14)
  REGION 1..29: note = C-term amide
HXQGTFTSDESKYKDSQAAKEFIQWLLQT

SEQ ID NO: 967 - protein, 29 aa, synthetic construct
  REGION 1..29: note = Description of Artificial Sequence: Synthetic peptide
  MOD_RES 2: note = Aib
  REGION 10..14: note = misc_feature - Cyclic
  MOD_RES 10: note = Glu is cyclized through side chain to form a lactam linkage
  MOD_RES 14: note = Lys is cyclized through side chain to form a lactam linkage
  MOD_RES 20: note = Lys(Z16)
  REGION 1..29: note = C-term amide
HXQGTFTSDESKYKDSQAAKEFIQWLLQT

SEQ ID NO: 968 - protein, 29 aa, synthetic construct
  REGION 1..29: note = Description of Artificial Sequence: Synthetic peptide
  MOD_RES 2: note = Aib
  REGION 10..14: note = misc_feature - Cyclic
  MOD_RES 10: note = Glu is cyclized through side chain to form a lactam linkage
  MOD_RES 14: note = Lys is cyclized through side chain to form a lactam linkage
  MOD_RES 20: note = Lys(Z18)
  REGION 1..29: note = C-term amide
HXQGTFTSDESKYKDSQAAKEFIQWLLQT

SEQ ID NO: 969 - protein, 29 aa, synthetic construct
  REGION 1..29: note = Description of Artificial Sequence: Synthetic peptide
  MOD_RES 2: note = Aib
  REGION 12..16: note = misc_feature - Cyclic
  MOD_RES 12: note = Glu is cyclized through side chain to form a lactam linkage
  MOD_RES 16: note = Lys is cyclized through side chain to form a lactam linkage
  MOD_RES 20: note = Lys(Me10)
  REGION 1..29: note = C-term amide
HXQGTFTSDYSEYLDKQAAKEFIQWLLQT

SEQ ID NO: 970 - protein, 29 aa, synthetic construct
  REGION 1..29: note = Description of Artificial Sequence: Synthetic peptide
  MOD_RES 2: note = Aib
  REGION 12..16: note = misc_feature - Cyclic
  MOD_RES 12: note = Glu is cyclized through side chain to form a lactam linkage
  MOD_RES 16: note = Lys is cyclized through side chain to form a lactam linkage
  MOD_RES 20: note = Lys(Me12)
  REGION 1..29: note = C-term amide
HXQGTFTSDYSEYLDKQAAKEFIQWLLQT

SEQ ID NO: 971 - protein, 29 aa, synthetic construct
  REGION 1..29: note = Description of Artificial Sequence: Synthetic peptide
  MOD_RES 2: note = Aib
  REGION 12..16: note = misc_feature - Cyclic
  MOD_RES 12: note = Glu is cyclized through side chain to form a lactam linkage
  MOD_RES 16: note = Lys is cyclized through side chain to form a lactam linkage
  MOD_RES 20: note = Lys(Me14)
  REGION 1..29: note = C-term amide
HXQGTFTSDYSEYLDKQAAKEFIQWLLQT

SEQ ID NO: 972 - protein, 29 aa, synthetic construct
  REGION 1..29: note = Description of Artificial Sequence: Synthetic peptide
  MOD_RES 2: note = Aib
  REGION 12..16: note = misc_feature - Cyclic
  MOD_RES 12: note = Glu is cyclized through side chain to form a lactam linkage
  MOD_RES 16: note = Lys is cyclized through side chain to form a lactam linkage
  MOD_RES 20: note = Lys(Me16)
  REGION 1..29: note = C-term amide
HXQGTFTSDYSEYLDKQAAKEFIQWLLQT

SEQ ID NO: 973 - protein, 29 aa, synthetic construct
  REGION 1..29: note = Description of Artificial Sequence: Synthetic peptide
  MOD_RES 2: note = Aib
  REGION 12..16: note = misc_feature - Cyclic
  MOD_RES 12: note = Glu is cyclized through side chain to form a lactam linkage
  MOD_RES 16: note = Lys is cyclized through side chain to form a lactam linkage
  MOD_RES 20: note = Lys(Me18)
  REGION 1..29: note = C-term amide
HXQGTFTSDYSEYLDKQAAKEFIQWLLQT

SEQ ID NO: 974 - protein, 29 aa, synthetic construct
  REGION 1..29: note = Description of Artificial Sequence: Synthetic peptide
  MOD_RES 2: note = Aib
  REGION 12..16: note = misc_feature - Cyclic
  MOD_RES 12: note = Glu is cyclized through side chain to form a lactam linkage
  MOD_RES 16: note = Lys is cyclized through side chain to form a lactam linkage
  MOD_RES 20: note = Lys(Z10)
  REGION 1..29: note = C-term amide
HXQGTFTSDYSEYLDKQAAKEFIQWLLQT

SEQ ID NO: 975 - protein, 29 aa, synthetic construct
  REGION 1..29: note = Description of Artificial Sequence: Synthetic peptide
  MOD_RES 2: note = Aib
  REGION 12..16: note = misc_feature - Cyclic
  MOD_RES 12: note = Glu is cyclized through side chain to form a lactam linkage
  MOD_RES 16: note = Lys is cyclized through side chain to form a lactam linkage
  MOD_RES 20: note = Lys(Z12)
  REGION 1..29: note = C-term amide
HXQGTFTSDYSEYLDKQAAKEFIQWLLQT

SEQ ID NO: 976 - protein, 29 aa, synthetic construct
  REGION 1..29: note = Description of Artificial Sequence: Synthetic peptide
  MOD_RES 2: note = Aib
  REGION 12..16: note = misc_feature - Cyclic
  MOD_RES 12: note = Glu is cyclized through side chain to form a lactam linkage
  MOD_RES 16: note = Lys is cyclized through side chain to form a lactam linkage
  MOD_RES 20: note = Lys(Z14)
  REGION 1..29: note = C-term amide
HXQGTFTSDYSEYLDKQAAKEFIQWLLQT

SEQ ID NO: 977 - protein, 29 aa, synthetic construct
  REGION 1..29: note = Description of Artificial Sequence: Synthetic peptide
  MOD_RES 2: note = Aib
  REGION 12..16: note = misc_feature - Cyclic
  MOD_RES 12: note = Glu is cyclized through side chain to form a lactam linkage
  MOD_RES 16: note = Lys is cyclized through side chain to form a lactam linkage
  MOD_RES 20: note = Lys(Z16)
  REGION 1..29: note = C-term amide
HXQGTFTSDYSEYLDKQAAKEFIQWLLQT

SEQ ID NO: 978 - protein, 29 aa, synthetic construct
  REGION 1..29: note = Description of Artificial Sequence: Synthetic peptide
  MOD_RES 2: note = Aib
  REGION 12..16: note = misc_feature - Cyclic
  MOD_RES 12: note = Glu is cyclized through side chain to form a lactam linkage
  MOD_RES 16: note = Lys is cyclized through side chain to form a lactam linkage
  MOD_RES 20: note = Lys(Z18)
  REGION 1..29: note = C-term amide
HXQGTFTSDYSEYLDKQAAKEFIQWLLQT

SEQ ID NO: 979 - protein, 29 aa, synthetic construct
  REGION 1..29: note = Description of Artificial Sequence: Synthetic peptide
  MOD_RES 2: note = Aib
  REGION 10..14: note = misc_feature - Cyclic
  MOD_RES 10: note = Glu is cyclized through side chain to form a lactam linkage
  MOD_RES 14: note = Lys is cyclized through side chain to form a lactam linkage
  MOD_RES 20: note = LysS1(Me10)
  REGION 1..29: note = C-term amide
HXQGTFTSDESKYKDSQAAKEFIQWLLQT

SEQ ID NO: 980 - protein, 29 aa, synthetic construct
  REGION 1..29: note = Description of Artificial Sequence: Synthetic peptide
  MOD_RES 2: note = Aib
  REGION 10..14: note = misc_feature - Cyclic
  MOD_RES 10: note = Glu is cyclized through side chain to form a lactam linkage
  MOD_RES 14: note = Lys is cyclized through side chain to form a lactam linkage
  MOD_RES 20: note = LysS1(Me12)
  REGION 1..29: note = C-term amide
HXQGTFTSDESKYKDSQAAKEFIQWLLQT

SEQ ID NO: 981 - protein, 29 aa, synthetic construct
  REGION 1..29: note = Description of Artificial Sequence: Synthetic peptide
  MOD_RES 2: note = Aib
  REGION 10..14: note = misc_feature - Cyclic
  MOD_RES 10: note = Glu is cyclized through side chain to form a lactam linkage
  MOD_RES 14: note = Lys is cyclized through side chain to form a lactam linkage
  MOD_RES 20: note = LysS1(Me14)
  REGION 1..29: note = C-term amide
HXQGTFTSDESKYKDSQAAKEFIQWLLQT

SEQ ID NO: 982 - protein, 29 aa, synthetic construct
  REGION 1..29: note = Description of Artificial Sequence: Synthetic peptide
  MOD_RES 2: note = Aib
  REGION 10..14: note = misc_feature - Cyclic
  MOD_RES 10: note = Glu is cyclized through side chain to form a lactam linkage
  MOD_RES 14: note = Lys is cyclized through side chain to form a lactam linkage
  MOD_RES 20: note = LysS1(Me16)
  REGION 1..29: note = C-term amide
HXQGTFTSDESKYKDSQAAKEFIQWLLQT

SEQ ID NO: 983 - protein, 29 aa, synthetic construct
  REGION 1..29: note = Description of Artificial Sequence: Synthetic peptide
  MOD_RES 2: note = Aib
  REGION 10..14: note = misc_feature - Cyclic
  MOD_RES 10: note = Glu is cyclized through side chain to form a lactam linkage
  MOD_RES 14: note = Lys is cyclized through side chain to form a lactam linkage
  MOD_RES 20: note = LysS1(Me18)
  REGION 1..29: note = C-term amide
HXQGTFTSDESKYKDSQAAKEFIQWLLQT

SEQ ID NO: 984 - protein, 29 aa, synthetic construct
  REGION 1..29: note = Description of Artificial Sequence: Synthetic peptide
  MOD_RES 2: note = Aib
  REGION 10..14: note = misc_feature - Cyclic
  MOD_RES 10: note = Glu is cyclized through side chain to form a lactam linkage
  MOD_RES 14: note = Lys is cyclized through side chain to form a lactam linkage
  MOD_RES 20: note = LysS2(Me10)
  REGION 1..29: note = C-term amide
HXQGTFTSDESKYKDSQAAKEFIQWLLQT

SEQ ID NO: 985 - protein, 29 aa, synthetic construct
  REGION 1..29: note = Description of Artificial Sequence: Synthetic peptide
  MOD_RES 2: note = Aib
  REGION 10..14: note = misc_feature - Cyclic
  MOD_RES 10: note = Glu is cyclized through side chain to form a lactam linkage
  MOD_RES 14: note = Lys is cyclized through side chain to form a lactam linkage
  MOD_RES 20: note = LysS2(Me12)
  REGION 1..29: note = C-term amide
HXQGTFTSDESKYKDSQAAKEFIQWLLQT

SEQ ID NO: 986 - protein, 29 aa, synthetic construct
  REGION 1..29: note = Description of Artificial Sequence: Synthetic peptide
  MOD_RES 2: note = Aib
  REGION 10..14: note = misc_feature - Cyclic
  MOD_RES 10: note = Glu is cyclized through side chain to form a lactam linkage
  MOD_RES 14: note = Lys is cyclized through side chain to form a lactam linkage
  MOD_RES 20: note = LysS3(Me14)
  REGION 1..29: note = C-term amide
HXQGTFTSDESKYKDSQAAKEFIQWLLQT

SEQ ID NO: 987 - protein, 29 aa, synthetic construct
  REGION 1..29: note = Description of Artificial Sequence: Synthetic peptide
  MOD_RES 2: note = Aib
  REGION 10..14: note = misc_feature - Cyclic
  MOD_RES 10: note = Glu is cyclized through side chain to form a lactam linkage
  MOD_RES 14: note = Lys is cyclized through side chain to form a lactam linkage
  MOD_RES 20: note = LysS3(Me16)
  REGION 1..29: note = C-term amide
HXQGTFTSDESKYKDSQAAKEFIQWLLQT

SEQ ID NO: 988 - protein, 29 aa, synthetic construct
  REGION 1..29: note = Description of Artificial Sequence: Synthetic peptide
  MOD_RES 2: note = Aib
  REGION 10..14: note = misc_feature - Cyclic
  MOD_RES 10: note = Glu is cyclized through side chain to form a lactam linkage
  MOD_RES 14: note = Lys is cyclized through side chain to form a lactam linkage
  MOD_RES 20: note = LysS2(Me18)
  REGION 1..29: note = C-term amide
HXQGTFTSDESKYKDSQAAKEFIQWLLQT

SEQ ID NO: 989 - protein, 29 aa, synthetic construct
  REGION 1..29: note = Description of Artificial Sequence: Synthetic peptide
  MOD_RES 2: note = Aib
  REGION 10..14: note = misc_feature - Cyclic
  MOD_RES 10: note = Glu is cyclized through side chain to form a lactam linkage
  MOD_RES 14: note = Lys is cyclized through side chain to form a lactam linkage
  MOD_RES 20: note = LysS2(Me14)
  REGION 1..29: note = C-term amide
HXQGTFTSDESKYKDSQAAKEFIQWLLQT

SEQ ID NO: 990 - protein, 29 aa, synthetic construct
  REGION 1..29: note = Description of Artificial Sequence: Synthetic peptide
  MOD_RES 2: note = Aib
  REGION 10..14: note = misc_feature - Cyclic
  MOD_RES 10: note = Glu is cyclized through side chain to form a lactam linkage
  MOD_RES 14: note = Lys is cyclized through side chain to form a lactam linkage
  MOD_RES 20: note = LysS2(Me16)
  REGION 1..29: note = C-term amide
HXQGTFTSDESKYKDSQAAKEFIQWLLQT

SEQ ID NO: 991 - protein, 29 aa, synthetic construct
  REGION 1..29: note = Description of Artificial Sequence: Synthetic peptide
  MOD_RES 2: note = Aib
  REGION 10..14: note = misc_feature - Cyclic
  MOD_RES 10: note = Glu is cyclized through side chain to form a lactam linkage
  MOD_RES 14: note = Lys is cyclized through side chain to form a lactam linkage
  MOD_RES 20: note = LysS1(Z10)
  REGION 1..29: note = C-term amide
HXQGTFTSDESKYKDSQAAKEFIQWLLQT

SEQ ID NO: 992 - protein, 29 aa, synthetic construct
  REGION 1..29: note = Description of Artificial Sequence: Synthetic peptide
  MOD_RES 2: note = Aib
  REGION 10..14: note = misc_feature - Cyclic
  MOD_RES 10: note = Glu is cyclized through side chain to form a lactam linkage
  MOD_RES 14: note = Lys is cyclized through side chain to form a lactam linkage
  MOD_RES 20: note = LysS1(Z12)
  REGION 1..29: note = C-term amide
HXQGTFTSDESKYKDSQAAKEFIQWLLQT

SEQ ID NO: 993 - protein, 29 aa, synthetic construct
  REGION 1..29: note = Description of Artificial Sequence: Synthetic peptide
  MOD_RES 2: note = Aib
  REGION 10..14: note = misc_feature - Cyclic
  MOD_RES 10: note = Glu is cyclized through side chain to form a lactam linkage
  MOD_RES 14: note = Lys is cyclized through side chain to form a lactam linkage
  MOD_RES 20: note = LysS1(Z14)
  REGION 1..29: note = C-term amide
HXQGTFTSDESKYKDSQAAKEFIQWLLQT

SEQ ID NO: 994 - protein, 29 aa, synthetic construct
  REGION 1..29: note = Description of Artificial Sequence: Synthetic peptide
  MOD_RES 2: note = Aib
  REGION 10..14: note = misc_feature - Cyclic
  MOD_RES 10: note = Glu is cyclized through side chain to form a lactam linkage
  MOD_RES 14: note = Lys is cyclized through side chain to form a lactam linkage
  MOD_RES 20: note = LysS1(Z16)
  REGION 1..29: note = C-term amide
HXQGTFTSDESKYKDSQAAKEFIQWLLQT

SEQ ID NO: 995 - protein, 29 aa, synthetic construct
  REGION 1..29: note = Description of Artificial Sequence: Synthetic peptide
  MOD_RES 2: note = Aib
  REGION 10..14: note = misc_feature - Cyclic
  MOD_RES 10: note = Glu is cyclized through side chain to form a lactam linkage
  MOD_RES 14: note = Lys is cyclized through side chain to form a lactam linkage
  MOD_RES 20: note = LysS1(Z18)
  REGION 1..29: note = C-term amide
HXQGTFTSDESKYKDSQAAKEFIQWLLQT

SEQ ID NO: 996 - protein, 29 aa, synthetic construct
  REGION 1..29: note = Description of Artificial Sequence: Synthetic peptide
  MOD_RES 2: note = Aib
  REGION 10..14: note = misc_feature - Cyclic
  MOD_RES 10: note = Glu is cyclized through side chain to form a lactam linkage
  MOD_RES 14: note = Lys is cyclized through side chain to form a lactam linkage
  MOD_RES 20: note = LysS2(Z14)
  REGION 1..29: note = C-term amide
HXQGTFTSDESKYKDSQAAKEFIQWLLQT

SEQ ID NO: 997 - protein, 29 aa, synthetic construct
  REGION 1..29: note = Description of Artificial Sequence: Synthetic peptide
  MOD_RES 2: note = Aib
  REGION 10..14: note = misc_feature - Cyclic
  MOD_RES 10: note = Glu is cyclized through side chain to form a lactam linkage
  MOD_RES 14: note = Lys is cyclized through side chain to form a lactam linkage
  MOD_RES 20: note = LysS2(Z16)
  REGION 1..29: note = C-term amide
HXQGTFTSDESKYKDSQAAKEFIQWLLQT

SEQ ID NO: 998 - protein, 29 aa, synthetic construct
  REGION 1..29: note = Description of Artificial Sequence: Synthetic peptide
  MOD_RES 2: note = Aib
  REGION 10..14: note = misc_feature - Cyclic
  MOD_RES 10: note = Glu is cyclized through side chain to form a lactam linkage
  MOD_RES 14: note = Lys is cyclized through side chain to form a lactam linkage
  MOD_RES 20: note = LysS2(Z18)
  REGION 1..29: note = C-term amide
HXQGTFTSDESKYKDSQAAKEFIQWLLQT

SEQ ID NO: 999 - protein, 29 aa, synthetic construct
  REGION 1..29: note = Description of Artificial Sequence: Synthetic peptide
  MOD_RES 2: note = Aib
  REGION 10..14: note = misc_feature - Cyclic
  MOD_RES 10: note = Glu is cyclized through side chain to form a lactam linkage
  MOD_RES 14: note = Lys is cyclized through side chain to form a lactam linkage
  MOD_RES 20: note = LysS3(Z14)
  REGION 1..29: note = C-term amide
HXQGTFTSDESKYKDSQAAKEFIQWLLQT

SEQ ID NO: 1000 - protein, 29 aa, synthetic construct
  REGION 1..29: note = Description of Artificial Sequence: Synthetic peptide
  MOD_RES 2: note = Aib
  REGION 10..14: note = misc_feature - Cyclic
  MOD_RES 10: note = Glu is cyclized through side chain to form a lactam linkage
  MOD_RES 14: note = Lys is cyclized through side chain to form a lactam linkage
  MOD_RES 20: note = LysS3(Z16)
  REGION 1..29: note = C-term amide
HXQGTFTSDESKYKDSQAAKEFIQWLLQT

SEQ ID NO: 1001 - protein, 29 aa, synthetic construct
  REGION 1..29: note = Description of Artificial Sequence: Synthetic peptide
  MOD_RES 2: note = Aib
  REGION 10..14: note = misc_feature - Cyclic
  MOD_RES 10: note = Glu is cyclized through side chain to form a lactam linkage
  MOD_RES 14: note = Lys is cyclized through side chain to form a lactam linkage
  MOD_RES 20: note = LysS3(Z18)
  REGION 1..29: note = C-term amide
HXQGTFTSDESKYKDSQAAKEFIQWLLQT

SEQ ID NO: 1002 - protein, 29 aa, synthetic construct
  REGION 1..29: note = Description of Artificial Sequence: Synthetic peptide
  MOD_RES 2: note = Aib
  REGION 12..16: note = misc_feature - Cyclic
  MOD_RES 12: note = Glu is cyclized through side chain to form a lactam linkage
  MOD_RES 16: note = Lys is cyclized through side chain to form a lactam linkage
  MOD_RES 20: note = LysS1(Me10)
  REGION 1..29: note = C-term amide
HXQGTFTSDYSEYLDKQAAKEFIQWLLQT

SEQ ID NO: 1003 - protein, 29 aa, synthetic construct
  REGION 1..29: note = Description of Artificial Sequence: Synthetic peptide
  MOD_RES 2: note = Aib
  REGION 12..16: note = misc_feature - Cyclic
  MOD_RES 12: note = Glu is cyclized through side chain to form a lactam linkage
  MOD_RES 16: note = Lys is cyclized through side chain to form a lactam linkage
  MOD_RES 20: note = LysS1(Me12)
  REGION 1..29: note = C-term amide
HXQGTFTSDYSEYLDKQAAKEFIQWLLQT

SEQ ID NO: 1004 - protein, 29 aa, synthetic construct
  REGION 1..29: note = Description of Artificial Sequence: Synthetic peptide
  MOD_RES 2: note = Aib
  REGION 12..16: note = misc_feature - Cyclic
  MOD_RES 12: note = Glu is cyclized through side chain to form a lactam linkage
  MOD_RES 16: note = Lys is cyclized through side chain to form a lactam linkage
  MOD_RES 20: note = LysS1(Me14)
  REGION 1..29: note = C-term amide
HXQGTFTSDYSEYLDKQAAKEFIQWLLQT

SEQ ID NO: 1005 - protein, 29 aa, synthetic construct
  REGION 1..29: note = Description of Artificial Sequence: Synthetic peptide
  MOD_RES 2: note = Aib
  REGION 12..16: note = misc_feature - Cyclic
  MOD_RES 12: note = Glu is cyclized through side chain to form a lactam linkage
  MOD_RES 16: note = Lys is cyclized through side chain to form a lactam linkage
  MOD_RES 20: note = LysS1(Me16)
  REGION 1..29: note = C-term amide
HXQGTFTSDYSEYLDKQAAKEFIQWLLQT

SEQ ID NO: 1006 - protein, 29 aa, synthetic construct
  REGION 1..29: note = Description of Artificial Sequence: Synthetic peptide
  MOD_RES 2: note = Aib
  REGION 12..16: note = misc_feature - Cyclic
  MOD_RES 12: note = Glu is cyclized through side chain to form a lactam linkage
  MOD_RES 16: note = Lys is cyclized through side chain to form a lactam linkage
  MOD_RES 20: note = LysS1(Me18)
  REGION 1..29: note = C-term amide
HXQGTFTSDYSEYLDKQAAKEFIQWLLQT

SEQ ID NO: 1007 - protein, 29 aa, synthetic construct
  REGION 1..29: note = Description of Artificial Sequence: Synthetic peptide
  MOD_RES 2: note = Aib
  REGION 12..16: note = misc_feature - Cyclic
  MOD_RES 12: note = Glu is cyclized through side chain to form a lactam linkage
  MOD_RES 16: note = Lys is cyclized through side chain to form a lactam linkage
  MOD_RES 20: note = LysS2(Me10)
  REGION 1..29: note = C-term amide
HXQGTFTSDYSEYLDKQAAKEFIQWLLQT

SEQ ID NO: 1008 - protein, 29 aa, synthetic construct
  REGION 1..29: note = Description of Artificial Sequence: Synthetic peptide
  MOD_RES 2: note = Aib
  REGION 12..16: note = misc_feature - Cyclic
  MOD_RES 12: note = Glu is cyclized through side chain to form a lactam linkage
  MOD_RES 16: note = Lys is cyclized through side chain to form a lactam linkage
  MOD_RES 20: note = LysS2(Me12)
  REGION 1..29: note = C-term amide
HXQGTFTSDYSEYLDKQAAKEFIQWLLQT

SEQ ID NO: 1009 - protein, 29 aa, synthetic construct
  REGION 1..29: note = Description of Artificial Sequence: Synthetic peptide
  MOD_RES 2: note = Aib
  REGION 12..16: note = misc_feature - Cyclic
  MOD_RES 12: note = Glu is cyclized through side chain to form a lactam linkage
  MOD_RES 16: note = Lys is cyclized through side chain to form a lactam linkage
  MOD_RES 20: note = LysS3(Me14)
  REGION 1..29: note = C-term amide
HXQGTFTSDYSEYLDKQAAKEFIQWLLQT

SEQ ID NO: 1010 - protein, 29 aa, synthetic construct
  REGION 1..29: note = Description of Artificial Sequence: Synthetic peptide
  MOD_RES 2: note = Aib
  REGION 12..16: note = misc_feature - Cyclic
  MOD_RES 12: note = Glu is cyclized through side chain to form a lactam linkage
  MOD_RES 16: note = Lys is cyclized through side chain to form a lactam linkage
  MOD_RES 20: note = LysS3(Me16)
  REGION 1..29: note = C-term amide
HXQGTFTSDYSEYLDKQAAKEFIQWLLQT

SEQ ID NO: 1011 - protein, 29 aa, synthetic construct
  REGION 1..29: note = Description of Artificial Sequence: Synthetic peptide
  MOD_RES 2: note = Aib
  REGION 12..16: note = misc_feature - Cyclic
  MOD_RES 12: note = Glu is cyclized through side chain to form a lactam linkage
  MOD_RES 16: note = Lys is cyclized through side chain to form a lactam linkage
  MOD_RES 20: note = LysS2(Me18)
  REGION 1..29: note = C-term amide
HXQGTFTSDYSEYLDKQAAKEFIQWLLQT

SEQ ID NO: 1012 - protein, 29 aa, synthetic construct
  REGION 1..29: note = Description of Artificial Sequence: Synthetic peptide
  MOD_RES 2: note = Aib
  REGION 12..16: note = misc_feature - Cyclic
  MOD_RES 12: note = Glu is cyclized through side chain to form a lactam linkage
  MOD_RES 16: note = Lys is cyclized through side chain to form a lactam linkage
  MOD_RES 20: note = LysS2(Me14)
  REGION 1..29: note = C-term amide
HXQGTFTSDYSEYLDKQAAKEFIQWLLQT

SEQ ID NO: 1013 - protein, 29 aa, synthetic construct
  REGION 1..29: note = Description of Artificial Sequence: Synthetic peptide
  MOD_RES 2: note = Aib
  REGION 12..16: note = misc_feature - Cyclic
  MOD_RES 12: note = Glu is cyclized through side chain to form a lactam linkage
  MOD_RES 16: note = Lys is cyclized through side chain to form a lactam linkage
  MOD_RES 20: note = LysS2(Me16)
  REGION 1..29: note = C-term amide
HXQGTFTSDYSEYLDKQAAKEFIQWLLQT

SEQ ID NO: 1014 - protein, 29 aa, synthetic construct
  REGION 1..29: note = Description of Artificial Sequence: Synthetic peptide
  MOD_RES 2: note = Aib
  REGION 12..16: note = misc_feature - Cyclic
  MOD_RES 12: note = Glu is cyclized through side chain to form a lactam linkage
  MOD_RES 16: note = Lys is cyclized through side chain to form a lactam linkage
  MOD_RES 20: note = LysS1(Z10)
  REGION 1..29: note = C-term amide
HXQGTFTSDYSEYLDKQAAKEFIQWLLQT

SEQ ID NO: 1015 - protein, 29 aa, synthetic construct
  REGION 1..29: note = Description of Artificial Sequence: Synthetic peptide
  MOD_RES 2: note = Aib
  REGION 12..16: note = misc_feature - Cyclic
  MOD_RES 12: note = Glu is cyclized through side chain to form a lactam linkage
  MOD_RES 16: note = Lys is cyclized through side chain to form a lactam linkage
  MOD_RES 20: note = LysS1(Z12)
  REGION 1..29: note = C-term amide
HXQGTFTSDYSEYLDKQAAKEFIQWLLQT

SEQ ID NO: 1016 - protein, 29 aa, synthetic construct
  REGION 1..29: note = Description of Artificial Sequence: Synthetic peptide
  MOD_RES 2: note = Aib
  REGION 12..16: note = misc_feature - Cyclic
  MOD_RES 12: note = Glu is cyclized through side chain to form a lactam linkage
  MOD_RES 16: note = Lys is cyclized through side chain to form a lactam linkage
  MOD_RES 20: note = LysS1(Z14)
  REGION 1..29: note = C-term amide
HXQGTFTSDYSEYLDKQAAKEFIQWLLQT

SEQ ID NO: 1017 - protein, 29 aa, synthetic construct
  REGION 1..29: note = Description of Artificial Sequence: Synthetic peptide
  MOD_RES 2: note = Aib
  REGION 12..16: note = misc_feature - Cyclic
  MOD_RES 12: note = Glu is cyclized through side chain to form a lactam linkage
  MOD_RES 16: note = Lys is cyclized through side chain to form a lactam linkage
  MOD_RES 20: note = LysS1(Z16)
  REGION 1..29: note = C-term amide
HXQGTFTSDYSEYLDKQAAKEFIQWLLQT

SEQ ID NO: 1018 - protein, 29 aa, synthetic construct
  REGION 1..29: note = Description of Artificial Sequence: Synthetic peptide
  MOD_RES 2: note = Aib
  REGION 12..16: note = misc_feature - Cyclic
  MOD_RES 12: note = Glu is cyclized through side chain to form a lactam linkage
  MOD_RES 16: note = Lys is cyclized through side chain to form a lactam linkage
  MOD_RES 20: note = LysS1(Z18)
  REGION 1..29: note = C-term amide
HXQGTFTSDYSEYLDKQAAKEFIQWLLQT

SEQ ID NO: 1019 - protein, 29 aa, synthetic construct
  REGION 1..29: note = Description of Artificial Sequence: Synthetic peptide
  MOD_RES 2: note = Aib
  REGION 12..16: note = misc_feature - Cyclic
  MOD_RES 12: note = Glu is cyclized through side chain to form a lactam linkage
  MOD_RES 16: note = Lys is cyclized through side chain to form a lactam linkage
  MOD_RES 20: note = LysS2(Z14)
  REGION 1..29: note = C-term amide
HXQGTFTSDYSEYLDKQAAKEFIQWLLQT

SEQ ID NO: 1020 - protein, 29 aa, synthetic construct
  REGION 1..29: note = Description of Artificial Sequence: Synthetic peptide
  MOD_RES 2: note = Aib
  REGION 12..16: note = misc_feature - Cyclic
  MOD_RES 12: note = Glu is cyclized through side chain to form a lactam linkage
  MOD_RES 16: note = Lys is cyclized through side chain to form a lactam linkage
  MOD_RES 20: note = LysS2(Z16)
  REGION 1..29: note = C-term amide
HXQGTFTSDYSEYLDKQAAKEFIQWLLQT

SEQ ID NO: 1021 - protein, 29 aa, synthetic construct
  REGION 1..29: note = Description of Artificial Sequence: Synthetic peptide
  MOD_RES 2: note = Aib
  REGION 12..16: note = misc_feature - Cyclic
  MOD_RES 12: note = Glu is cyclized through side chain to form a lactam linkage
  MOD_RES 16: note = Lys is cyclized through side chain to form a lactam linkage
  MOD_RES 20: note = LysS2(Z18)
  REGION 1..29: note = C-term amide
HXQGTFTSDYSEYLDKQAAKEFIQWLLQT

SEQ ID NO: 1022 - protein, 29 aa, synthetic construct
  REGION 1..29: note = Description of Artificial Sequence: Synthetic peptide
  MOD_RES 2: note = Aib
  REGION 12..16: note = misc_feature - Cyclic
  MOD_RES 12: note = Glu is cyclized through side chain to form a lactam linkage
  MOD_RES 16: note = Lys is cyclized through side chain to form a lactam linkage
  MOD_RES 20: note = LysS3(Z14)
  REGION 1..29: note = C-term amide
HXQGTFTSDYSEYLDKQAAKEFIQWLLQT

SEQ ID NO: 1023 - protein, 29 aa, synthetic construct
  REGION 1..29: note = Description of Artificial Sequence: Synthetic peptide
  MOD_RES 2: note = Aib
  REGION 12..16: note = misc_feature - Cyclic
  MOD_RES 12: note = Glu is cyclized through side chain to form a lactam linkage
  MOD_RES 16: note = Lys is cyclized through side chain to form a lactam linkage
  MOD_RES 20: note = LysS3(Z16)
  REGION 1..29: note = C-term amide
HXQGTFTSDYSEYLDKQAAKEFIQWLLQT

SEQ ID NO: 1024 - protein, 29 aa, synthetic construct
  REGION 1..29: note = Description of Artificial Sequence: Synthetic peptide
  MOD_RES 2: note = Aib
  REGION 12..16: note = misc_feature - Cyclic
  MOD_RES 12: note = Glu is cyclized through side chain to form a lactam linkage
  MOD_RES 16: note = Lys is cyclized through side chain to form a lactam linkage
  MOD_RES 20: note = LysS3(Z18)
  REGION 1..29: note = C-term amide
HXQGTFTSDYSEYLDKQAAKEFIQWLLQT

SEQ ID NO: 1025 - protein, 29 aa, synthetic construct
  REGION 1..29: note = Description of Artificial Sequence: Synthetic peptide
  MOD_RES 2: note = Aib
  MOD_RES 10: note = Any natural or unnatural amino acid comprising a functional group used for covalent attachment to the surfactant X
  REGION 16..20: note = misc_feature - Cyclic
  MOD_RES 16: note = Lys or Glu cyclized through their side chains to form a lactam linkage
  MOD_RES 17: note = Glu or Gln
  MOD_RES 20: note = Lys or Glu cyclized through their side chains to form a lactam linkage
  MOD_RES 24: note = Ala, Glu or Gln
  MOD_RES 28: note = Asn or Gln
  REGION 1..29: note = C-term -OH or NH-R3
HXQGTFTSDXSKYLDXXAAXEFIXWLLXT

SEQ ID NO: 1026 - protein, 29 aa, synthetic construct
  REGION 1..29: note = Description of Artificial Sequence: Synthetic peptide
  MOD_RES 2: note = Aib
  REGION 16..20: note = misc_feature - Cyclic
  MOD_RES 16: note = Lys or Glu cyclized through their side chains to form a lactam linkage
  MOD_RES 17: note = Any natural or unnatural amino acid comprising a functional group used for covalent attachment to the surfactant X
  MOD_RES 20: note = Lys or Glu cyclized through their side chains to form a lactam linkage
  MOD_RES 24: note = Ala, Glu or Gln
  MOD_RES 28: note = Asn or Gln
  REGION 1..29: note = C-term -OH or NH-R3
HXQGTFTSDYSKYLDXXAAXEFIXWLLXT

SEQ ID NO: 1027 - protein, 29 aa, synthetic construct
  REGION 1..29: note = Description of Artificial Sequence: Synthetic peptide
  MOD_RES 2: note = Aib
  REGION 10..14: note = misc_feature - Cyclic
  MOD_RES 10: note = Lys or Glu cyclized through their side chains to form a lactam linkage
  MOD_RES 14: note = Lys or Glu cyclized through their side chains to form a lactam linkage
  MOD_RES 17: note = Glu or Gln
  MOD_RES 20: note = Any natural or unnatural amino acid comprising a functional group used for covalent attachment to the surfactant X
  MOD_RES 24: note = Ala, Glu or Gln
  MOD_RES 28: note = Asn or Gln
  REGION 1..29: note = C-term -OH or NH-R3
HXQGTFTSDXSKYXDSXAAXEFIXWLLXT

SEQ ID NO: 1028 - protein, 29 aa, synthetic construct
  REGION 1..29: note = Description of Artificial Sequence: Synthetic peptide
  MOD_RES 2: note = Aib
  REGION 12..16: note = misc_feature - Cyclic
  MOD_RES 12: note = Lys or Glu cyclized through their side chains to form a lactam linkage
  MOD_RES 16: note = Lys or Glu cyclized through their side chains to form a lactam linkage
  MOD_RES 17: note = Glu or Gln
  MOD_RES 20: note = Any natural or unnatural amino acid comprising a functional group used for covalent attachment to the surfactant X
  MOD_RES 24: note = Ala, Glu or Gln
  MOD_RES 28: note = Asn or Gln
  REGION 1..29: note = C-term -OH or NH-R3
HXQGTFTSDYSXYQDXXAAXEFIXWLLXT

SEQ ID NO: 1029 - protein, 29 aa, synthetic construct
  REGION 1..29: note = Description of Artificial Sequence: Synthetic peptide
  MOD_RES 2: note = Aib
  REGION 16..20: note = misc_feature - Cyclic
  MOD_RES 16: note = Lys or Glu cyclized through their side chains to form a lactam linkage
  MOD_RES 20: note = Lys or Glu cyclized through their side chains to form a lactam linkage
  MOD_RES 24: note = Any natural or unnatural amino acid comprising a functional group used for covalent attachment to the surfactant X
  MOD_RES 28: note = Asn or Gln
  REGION 1..29: note = C-term -OH or NH-R3
HXQGTFTSDYSKYLDXQAAXEFIXWLLXT

SEQ ID NO: 1030 - protein, 29 aa, synthetic construct
  REGION 1..29: note = Description of Artificial Sequence: Synthetic peptide
  MOD_RES 2: note = Aib
  REGION 16..20: note = misc_feature - Cyclic
  MOD_RES 16: note = Glu is cyclized through side chain to form a lactam linkage
  MOD_RES 17: note = LysS1(Me10)
  MOD_RES 20: note = Lys is cyclized through side chain to form a lactam linkage
  REGION 1..29: note = C-term amide
HXQGTFTSDYSKYLDEKAAKEFIQWLLQT

SEQ ID NO: 1031 - protein, 29 aa, synthetic construct
  REGION 1..29: note = Description of Artificial Sequence: Synthetic peptide
  MOD_RES 2: note = Aib
  REGION 16..20: note = misc_feature - Cyclic
  MOD_RES 16: note = Glu is cyclized through side chain to form a lactam linkage
  MOD_RES 17: note = LysS1(Me12)
  MOD_RES 20: note = Lys is cyclized through side chain to form a lactam linkage
  REGION 1..29: note = C-term amide
HXQGTFTSDYSKYLDEKAAKEFIQWLLQT

SEQ ID NO: 1032 - protein, 29 aa, synthetic construct
  REGION 1..29: note = Description of Artificial Sequence: Synthetic peptide
  MOD_RES 2: note = Aib
  REGION 16..20: note = misc_feature - Cyclic
  MOD_RES 16: note = Glu is cyclized through side chain to form a lactam linkage
  MOD_RES 17: note = LysS1(Me14)
  MOD_RES 20: note = Lys is cyclized through side chain to form a lactam linkage
  REGION 1..29: note = C-term amide
HXQGTFTSDYSKYLDEKAAKEFIQWLLQT

SEQ ID NO: 1033 - protein, 29 aa, synthetic construct
  REGION 1..29: note = Description of Artificial Sequence: Synthetic peptide
  MOD_RES 2: note = Aib
  REGION 16..20: note = misc_feature - Cyclic
  MOD_RES 16: note = Glu is cyclized through side chain to form a lactam linkage
  MOD_RES 17: note = LysS1(Me16)
  MOD_RES 20: note = Lys is cyclized through side chain to form a lactam linkage
  REGION 1..29: note = C-term amide
HXQGTFTSDYSKYLDEKAAKEFIQWLLQT

SEQ ID NO: 1034 - protein, 29 aa, synthetic construct
  REGION 1..29: note = Description of Artificial Sequence: Synthetic peptide
  MOD_RES 2: note = Aib
  REGION 16..20: note = misc_feature - Cyclic
  MOD_RES 16: note = Glu is cyclized through side chain to form a lactam linkage
  MOD_RES 17: note = LysS1(Me18)
  MOD_RES 20: note = Lys is cyclized through side chain to form a lactam linkage
  REGION 1..29: note = C-term amide
HXQGTFTSDYSKYLDEKAAKEFIQWLLQT

SEQ ID NO: 1035 - protein, 29 aa, synthetic construct
  REGION 1..29: note = Description of Artificial Sequence: Synthetic peptide
  MOD_RES 2: note = Aib
  REGION 16..20: note = misc_feature - Cyclic
  MOD_RES 16: note = Glu is cyclized through side chain to form a lactam linkage
  MOD_RES 17: note = LysS1(Me14)
  MOD_RES 20: note = Lys is cyclized through side chain to form a lactam linkage
  REGION 1..29: note = C-term amide
HXQGTFTSDYSKYLDEKAAKEFIEWLLQT

SEQ ID NO: 1036 - protein, 29 aa, synthetic construct
  REGION 1..29: note = Description of Artificial Sequence: Synthetic peptide
  MOD_RES 2: note = Aib
  REGION 16..20: note = misc_feature - Cyclic
  MOD_RES 16: note = Glu is cyclized through side chain to form a lactam linkage
  MOD_RES 17: note = LysS1(Me16)
  MOD_RES 20: note = Lys is cyclized through side chain to form a lactam linkage
  REGION 1..29: note = C-term amide
HXQGTFTSDYSKYLDEKAAKEFIQWLLQT

SEQ ID NO: 1037 - protein, 29 aa, synthetic construct
  REGION 1..29: note = Description of Artificial Sequence: Synthetic peptide
  MOD_RES 2: note = Aib
  REGION 16..20: note = misc_feature - Cyclic
  MOD_RES 16: note = Glu is cyclized through side chain to form a lactam linkage
  MOD_RES 17: note = LysS1(Me18)
  MOD_RES 20: note = Lys is cyclized through side chain to form a lactam linkage
  REGION 1..29: note = C-term amide
HXQGTFTSDYSKYLDEKAAKEFIQWLLQT

SEQ ID NO: 1038 - protein, 29 aa, synthetic construct
  REGION 1..29: note = Description of Artificial Sequence: Synthetic peptide
  MOD_RES 2: note = Aib
  REGION 16..20: note = misc_feature - Cyclic
  MOD_RES 16: note = Glu is cyclized through side chain to form a lactam linkage
  MOD_RES 17: note = LysS2(Me10)
  MOD_RES 20: note = Lys is cyclized through side chain to form a lactam linkage
  REGION 1..29: note = C-term amide
HXQGTFTSDYSKYLDEKAAKEFIQWLLQT

SEQ ID NO: 1039 - protein, 29 aa, synthetic construct
  REGION 1..29: note = Description of Artificial Sequence: Synthetic peptide
  MOD_RES 2: note = Aib
  REGION 16..20: note = misc_feature - Cyclic
  MOD_RES 16: note = Glu is cyclized through side chain to form a lactam linkage
  MOD_RES 17: note = LysS2(Me12)
  MOD_RES 20: note = Lys is cyclized through side chain to form a lactam linkage
  REGION 1..29: note = C-term amide
HXQGTFTSDYSKYLDEKAAKEFIQWLLQT

SEQ ID NO: 1040 - protein, 29 aa, synthetic construct
  REGION 1..29: note = Description of Artificial Sequence: Synthetic peptide
  MOD_RES 2: note = Aib
  REGION 16..20: note = misc_feature - Cyclic
  MOD_RES 16: note = Glu is cyclized through side chain to form a lactam linkage
  MOD_RES 17: note = LysS2(Me14)
  MOD_RES 20: note = Lys is cyclized through side chain to form a lactam linkage
  REGION 1..29: note = C-term amide
HXQGTFTSDYSKYLDEKAAKEFIQWLLQT

SEQ ID NO: 1041 - protein, 29 aa, synthetic construct
  REGION 1..29: note = Description of Artificial Sequence: Synthetic peptide
  MOD_RES 2: note = Aib
  REGION 16..20: note = misc_feature - Cyclic
  MOD_RES 16: note = Glu is cyclized through side chain to form a lactam linkage
  MOD_RES 17: note = LysS2(Me16)
  MOD_RES 20: note = Lys is cyclized through side chain to form a lactam linkage
  REGION 1..29: note = C-term amide
HXQGTFTSDYSKYLDEKAAKEFIQWLLQT

SEQ ID NO: 1042 - protein, 29 aa, synthetic construct
  REGION 1..29: note = Description of Artificial Sequence: Synthetic peptide
  MOD_RES 2: note = Aib
  REGION 16..20: note = misc_feature - Cyclic
  MOD_RES 16: note = Glu is cyclized through side chain to form a lactam linkage
  MOD_RES 17: note = LysS2(Me18)
  MOD_RES 20: note = Lys is cyclized through side chain to form a lactam linkage
  REGION 1..29: note = C-term amide
HXQGTFTSDYSKYLDEKAAKEFIQWLLQT

SEQ ID NO: 1043 - protein, 29 aa, synthetic construct
  REGION 1..29: note = Description of Artificial Sequence: Synthetic peptide
  MOD_RES 2: note = Aib
  REGION 16..20: note = misc_feature - Cyclic
  MOD_RES 16: note = Glu is cyclized through side chain to form a lactam linkage
  MOD_RES 17: note = LysS2(Me14)
  MOD_RES 20: note = Lys is cyclized through side chain to form a lactam linkage
  REGION 1..29: note = C-term amide
HXQGTFTSDYSKYLDEKAAKEFIEWLLQT

SEQ ID NO: 1044 - protein, 29 aa, synthetic construct
  REGION 1..29: note = Description of Artificial Sequence: Synthetic peptide
  MOD_RES 2: note = Aib
  REGION 16..20: note = misc_feature - Cyclic
  MOD_RES 16: note = Glu is cyclized through side chain to form a lactam linkage
  MOD_RES 17: note = LysS2(Me16)
  MOD_RES 20: note = Lys is cyclized through side chain to form a lactam linkage
  REGION 1..29: note = C-term amide
HXQGTFTSDYSKYLDEKAAKEFIEWLLQT

SEQ ID NO: 1045 - protein, 29 aa, synthetic construct
  REGION 1..29: note = Description of Artificial Sequence: Synthetic peptide
  MOD_RES 2: note = Aib
  REGION 16..20: note = misc_feature - Cyclic
  MOD_RES 16: note = Glu is cyclized through side chain to form a lactam linkage
  MOD_RES 17: note = LysS2(Me18)
  MOD_RES 20: note = Lys is cyclized through side chain to form a lactam linkage
  REGION 1..29: note = C-term amide
HXQGTFTSDYSKYLDEKAAKEFIEWLLQT

SEQ ID NO: 1046 - protein, 29 aa, synthetic construct
  REGION 1..29: note = Description of Artificial Sequence: Synthetic peptide
  MOD_RES 2: note = Aib
  REGION 16..20: note = misc_feature - Cyclic
  MOD_RES 16: note = Glu is cyclized through side chain to form a lactam linkage
  MOD_RES 17: note = LysS3(Me10)
  MOD_RES 20: note = Lys is cyclized through side chain to form a lactam linkage
  REGION 1..29: note = C-term amide
HXQGTFTSDYSKYLDEKAAKEFIQWLLQT

SEQ ID NO: 1047 - protein, 29 aa, synthetic construct
  REGION 1..29: note = Description of Artificial Sequence: Synthetic peptide
  MOD_RES 2: note = Aib
  REGION 16..20: note = misc_feature - Cyclic
  MOD_RES 16: note = Glu is cyclized through side chain to form a lactam linkage
  MOD_RES 17: note = LysS3(Me12)
  MOD_RES 20: note = Lys is cyclized through side chain to form a lactam linkage
  REGION 1..29: note = C-term amide
HXQGTFTSDYSKYLDEKAAKEFIQWLLQT

SEQ ID NO: 1048 - protein, 29 aa, synthetic construct
  REGION 1..29: note = Description of Artificial Sequence: Synthetic peptide
  MOD_RES 2: note = Aib
  REGION 16..20: note = misc_feature - Cyclic
  MOD_RES 16: note = Glu is cyclized through side chain to form a lactam linkage
  MOD_RES 17: note = LysS3(Me14)
  MOD_RES 20: note = Lys is cyclized through side chain to form a lactam linkage
  REGION 1..29: note = C-term amide
HXQGTFTSDYSKYLDEKAAKEFIQWLLQT

SEQ ID NO: 1049 - protein, 29 aa, synthetic construct
  REGION 1..29: note = Description of Artificial Sequence: Synthetic peptide
  MOD_RES 2: note = Aib
  REGION 16..20: note = misc_feature - Cyclic
  MOD_RES 16: note = Glu is cyclized through side chain to form a lactam linkage
  MOD_RES 17: note = LysS3(Me16)
  MOD_RES 20: note = Lys is cyclized through side chain to form a lactam linkage
  REGION 1..29: note = C-term amide
HXQGTFTSDYSKYLDEKAAKEFIQWLLQT

SEQ ID NO: 1050 - protein, 29 aa, synthetic construct
  REGION 1..29: note = Description of Artificial Sequence: Synthetic peptide
  MOD_RES 2: note = Aib
  REGION 16..20: note = misc_feature - Cyclic
  MOD_RES 16: note = Glu is cyclized through side chain to form a lactam linkage
  MOD_RES 17: note = LysS3(Me18)
  MOD_RES 20: note = Lys is cyclized through side chain to form a lactam linkage
  REGION 1..29: note = C-term amide
HXQGTFTSDYSKYLDEKAAKEFIQWLLQT

SEQ ID NO: 1051 - protein, 29 aa, synthetic construct
  REGION 1..29: note = Description of Artificial Sequence: Synthetic peptide
  MOD_RES 2: note = Aib
  REGION 16..20: note = misc_feature - Cyclic
  MOD_RES 16: note = Glu is cyclized through side chain to form a lactam linkage
  MOD_RES 17: note = LysS3(Me14)
  MOD_RES 20: note = Lys is cyclized through side chain to form a lactam linkage
  REGION 1..29: note = C-term amide
HXQGTFTSDYSKYLDEKAAKEFIEWLLQT

SEQ ID NO: 1052 - protein, 29 aa, synthetic construct
  REGION 1..29: note = Description of Artificial Sequence: Synthetic peptide
  MOD_RES 2: note = Aib
  REGION 16..20: note = misc_feature - Cyclic
  MOD_RES 16: note = Glu is cyclized through side chain to form a lactam linkage
  MOD_RES 17: note = LysS3(Me16)
  MOD_RES 20: note = Lys is cyclized through side chain to form a lactam linkage
  REGION 1..29: note = C-term amide
HXQGTFTSDYSKYLDEKAAKEFIEWLLQT

SEQ ID NO: 1053 - protein, 29 aa, synthetic construct
  REGION 1..29: note = Description of Artificial Sequence: Synthetic peptide
  MOD_RES 2: note = Aib
  REGION 16..20: note = misc_feature - Cyclic
  MOD_RES 16: note = Glu is cyclized through side chain to form a lactam linkage
  MOD_RES 17: note = LysS3(Me18)
  MOD_RES 20: note = Lys is cyclized through side chain to form a lactam linkage
  REGION 1..29: note = C-term amide
HXQGTFTSDYSKYLDEKAAKEFIEWLLQT

SEQ ID NO: 1054 - protein, 29 aa, synthetic construct
  REGION 1..29: note = Description of Artificial Sequence: Synthetic peptide
  MOD_RES 2: note = Aib
  REGION 16..20: note = misc_feature - Cyclic
  MOD_RES 16: note = Glu is cyclized through side chain to form a lactam linkage
  MOD_RES 17: note = LysS1(Z10)
  MOD_RES 20: note = Lys is cyclized through side chain to form a lactam linkage
  REGION 1..29: note = C-term amide
HXQGTFTSDYSKYLDEKAAKEFIQWLLQT

SEQ ID NO: 1055 - protein, 29 aa, synthetic construct
  REGION 1..29: note = Description of Artificial Sequence: Synthetic peptide
  MOD_RES 2: note = Aib
  REGION 16..20: note = misc_feature - Cyclic
  MOD_RES 16: note = Glu is cyclized through side chain to form a lactam linkage
  MOD_RES 17: note = LysS1(Z12)
  MOD_RES 20: note = Lys is cyclized through side chain to form a lactam linkage
  REGION 1..29: note = C-term amide
HXQGTFTSDYSKYLDEKAAKEFIQWLLQT

SEQ ID NO: 1056 - protein, 29 aa, synthetic construct
  REGION 1..29: note = Description of Artificial Sequence: Synthetic peptide
  MOD_RES 2: note = Aib
  REGION 16..20: note = misc_feature - Cyclic
  MOD_RES 16: note = Glu is cyclized through side chain to form a lactam linkage
  MOD_RES 17: note = LysS1(Z14)
  MOD_RES 20: note = Lys is cyclized through side chain to form a lactam linkage
  REGION 1..29: note = C-term amide
HXQGTFTSDYSKYLDEKAAKEFIQWLLQT

SEQ ID NO: 1057 - protein, 29 aa, synthetic construct
  REGION 1..29: note = Description of Artificial Sequence: Synthetic peptide
  MOD_RES 2: note = Aib
  REGION 16..20: note = misc_feature - Cyclic
  MOD_RES 16: note = Glu is cyclized through side chain to form a lactam linkage
  MOD_RES 17: note = LysS1(Z16)
  MOD_RES 20: note = Lys is cyclized through side chain to form a lactam linkage
  REGION 1..29: note = C-term amide
HXQGTFTSDYSKYLDEKAAKEFIQWLLQT

SEQ ID NO: 1058 - protein, 29 aa, synthetic construct
  REGION 1..29: note = Description of Artificial Sequence: Synthetic peptide
  MOD_RES 2: note = Aib
  REGION 16..20: note = misc_feature - Cyclic
  MOD_RES 16: note = Glu is cyclized through side chain to form a lactam linkage
  MOD_RES 17: note = LysS1(Z18)
  MOD_RES 20: note = Lys is cyclized through side chain to form a lactam linkage
  REGION 1..29: note = C-term amide
HXQGTFTSDYSKYLDEKAAKEFIQWLLQT

SEQ ID NO: 1059 - protein, 29 aa, synthetic construct
  REGION 1..29: note = Description of Artificial Sequence: Synthetic peptide
  MOD_RES 2: note = Aib
  REGION 16..20: note = misc_feature - Cyclic
  MOD_RES 16: note = Glu is cyclized through side chain to form a lactam linkage
  MOD_RES 17: note = LysS1(Z16)
  MOD_RES 20: note = Lys is cyclized through side chain to form a lactam linkage
  REGION 1..29: note = C-term amide
HXQGTFTSDYSKYLDEKAAKEFIEWLLQT

SEQ ID NO: 1060 - protein, 29 aa, synthetic construct
  REGION 1..29: note = Description of Artificial Sequence: Synthetic peptide
  MOD_RES 2: note = Aib
  REGION 16..20: note = misc_feature - Cyclic
  MOD_RES 16: note = Glu is cyclized through side chain to form a lactam linkage
  MOD_RES 17: note = LysS1(Z18)
  MOD_RES 20: note = Lys is cyclized through side chain to form a lactam linkage
  REGION 1..29: note = C-term amide
HXQGTFTSDYSKYLDEKAAKEFIEWLLQT

SEQ ID NO: 1061 - protein, 29 aa, synthetic construct
  REGION 1..29: note = Description of Artificial Sequence: Synthetic peptide
  MOD_RES 2: note = Aib
  REGION 16..20: note = misc_feature - Cyclic
  MOD_RES 16: note = Glu is cyclized through side chain to form a lactam linkage
  MOD_RES 17: note = LysS2(Z10)
  MOD_RES 20: note = Lys is cyclized through side chain to form a lactam linkage
  REGION 1..29: note = C-term amide
HXQGTFTSDYSKYLDEKAAKEFIQWLLQT

SEQ ID NO: 1062 - protein, 29 aa, synthetic construct
  REGION 1..29: note = Description of Artificial Sequence: Synthetic peptide
  MOD_RES 2: note = Aib
  REGION 16..20: note = misc_feature - Cyclic
  MOD_RES 16: note = Glu is cyclized through side chain to form a lactam linkage
  MOD_RES 17: note = LysS2(Z12)
  MOD_RES 20: note = Lys is cyclized through side chain to form a lactam linkage
  REGION 1..29: note = C-term amide
HXQGTFTSDYSKYLDEKAAKEFIQWLLQT

SEQ ID NO: 1063 - protein, 29 aa, synthetic construct
  REGION 1..29: note = Description of Artificial Sequence: Synthetic peptide
  MOD_RES 2: note = Aib
  REGION 16..20: note = misc_feature - Cyclic
  MOD_RES 16: note = Glu is cyclized through side chain to form a lactam linkage
  MOD_RES 17: note = LysS2(Z14)
  MOD_RES 20: note = Lys is cyclized through side chain to form a lactam linkage
  REGION 1..29: note = C-term amide
HXQGTFTSDYSKYLDEKAAKEFIQWLLQT

SEQ ID NO: 1064 - protein, 29 aa, synthetic construct
  REGION 1..29: note = Description of Artificial Sequence: Synthetic peptide
  MOD_RES 2: note = Aib
  REGION 16..20: note = misc_feature - Cyclic
  MOD_RES 16: note = Glu is cyclized through side chain to form a lactam linkage
  MOD_RES 17: note = LysS2(Z16)
  MOD_RES 20: note = Lys is cyclized through side chain to form a lactam linkage
  REGION 1..29: note = C-term amide
HXQGTFTSDYSKYLDEKAAKEFIQWLLQT

SEQ ID NO: 1065 - protein, 29 aa, synthetic construct
  REGION 1..29: note = Description of Artificial Sequence: Synthetic peptide
  MOD_RES 2: note = Aib
  REGION 16..20: note = misc_feature - Cyclic
  MOD_RES 16: note = Glu is cyclized through side chain to form a lactam linkage
  MOD_RES 17: note = LysS2(Z18)
  MOD_RES 20: note = Lys is cyclized through side chain to form a lactam linkage
  REGION 1..29: note = C-term amide
HXQGTFTSDYSKYLDEKAAKEFIQWLLQT

SEQ ID NO: 1066 - protein, 29 aa, synthetic construct
  REGION 1..29: note = Description of Artificial Sequence: Synthetic peptide
  MOD_RES 2: note = Aib
  REGION 16..20: note = misc_feature - Cyclic
  MOD_RES 16: note = Glu is cyclized through side chain to form a lactam linkage
  MOD_RES 17: note = LysS2(Z16)
  MOD_RES 20: note = Lys is cyclized through side chain to form a lactam linkage
  REGION 1..29: note = C-term amide
HXQGTFTSDYSKYLDEKAAKEFIEWLLQT

SEQ ID NO: 1067 - protein, 29 aa, synthetic construct
  REGION 1..29: note = Description of Artificial Sequence: Synthetic peptide
  MOD_RES 2: note = Aib
  REGION 16..20: note = misc_feature - Cyclic
  MOD_RES 16: note = Glu is cyclized through side chain to form a lactam linkage
  MOD_RES 17: note = LysS2(Z18)
  MOD_RES 20: note = Lys is cyclized through side chain to form a lactam linkage
  REGION 1..29: note = C-term amide
HXQGTFTSDYSKYLDEKAAKEFIEWLLQT

SEQ ID NO: 1068 - protein, 29 aa, synthetic construct
  REGION 1..29: note = Description of Artificial Sequence: Synthetic peptide
  MOD_RES 2: note = Aib
  REGION 16..20: note = misc_feature - Cyclic
  MOD_RES 16: note = Glu is cyclized through side chain to form a lactam linkage
  MOD_RES 17: note = LysS3(Z10)
  MOD_RES 20: note = Lys is cyclized through side chain to form a lactam linkage
  REGION 1..29: note = C-term amide
HXQGTFTSDYSKYLDEKAAKEFIQWLLQT

SEQ ID NO: 1069 - protein, 29 aa, synthetic construct
  REGION 1..29: note = Description of Artificial Sequence: Synthetic peptide
  MOD_RES 2: note = Aib
  REGION 16..20: note = misc_feature - Cyclic
  MOD_RES 16: note = Glu is cyclized through side chain to form a lactam linkage
  MOD_RES 17: note = LysS3(Z12)
  MOD_RES 20: note = Lys is cyclized through side chain to form a lactam linkage
  REGION 1..29: note = C-term amide
HXQGTFTSDYSKYLDEKAAKEFIQWLLQT

SEQ ID NO: 1070 - protein, 29 aa, synthetic construct
  REGION 1..29: note = Description of Artificial Sequence: Synthetic peptide
  MOD_RES 2: note = Aib
  REGION 16..20: note = misc_feature - Cyclic
  MOD_RES 16: note = Glu is cyclized through side chain to form a lactam linkage
  MOD_RES 17: note = LysS3(Z14)
  MOD_RES 20: note = Lys is cyclized through side chain to form a lactam linkage
  REGION 1..29: note = C-term amide
HXQGTFTSDYSKYLDEKAAKEFIQWLLQT

SEQ ID NO: 1071 - protein, 29 aa, synthetic construct
  REGION 1..29: note = Description of Artificial Sequence: Synthetic peptide
  MOD_RES 2: note = Aib
  REGION 16..20: note = misc_feature - Cyclic
  MOD_RES 16: note = Glu is cyclized through side chain to form a lactam linkage
  MOD_RES 17: note = LysS3(Z16)
  MOD_RES 20: note = Lys is cyclized through side chain to form a lactam linkage
  REGION 1..29: note = C-term amide
HXQGTFTSDYSKYLDEKAAKEFIQWLLQT

SEQ ID NO: 1072 - protein, 29 aa, synthetic construct
  REGION 1..29: note = Description of Artificial Sequence: Synthetic peptide
  MOD_RES 2: note = Aib
  REGION 16..20: note = misc_feature - Cyclic
  MOD_RES 16: note = Glu is cyclized through side chain to form a lactam linkage
  MOD_RES 17: note = LysS3(Z18)
  MOD_RES 20: note = Lys is cyclized through side chain to form a lactam linkage
  REGION 1..29: note = C-term amide
HXQGTFTSDYSKYLDEKAAKEFIQWLLQT

SEQ ID NO: 1073 - protein, 29 aa, synthetic construct
  REGION 1..29: note = Description of Artificial Sequence: Synthetic peptide
  MOD_RES 2: note = Aib
  REGION 16..20: note = misc_feature - Cyclic
  MOD_RES 16: note = Glu is cyclized through side chain to form a lactam linkage
  MOD_RES 17: note = LysS3(Z16)
  MOD_RES 20: note = Lys is cyclized through side chain to form a lactam linkage
  REGION 1..29: note = C-term amide
HXQGTFTSDYSKYLDEKAAKEFIEWLLQT

SEQ ID NO: 1074 - protein, 29 aa, synthetic construct
  REGION 1..29: note = Description of Artificial Sequence: Synthetic peptide
  MOD_RES 2: note = Aib
  REGION 16..20: note = misc_feature - Cyclic
  MOD_RES 16: note = Glu is cyclized through side chain to form a lactam linkage
  MOD_RES 17: note = LysS3(Z18)
  MOD_RES 20: note = Lys is cyclized through side chain to form a lactam linkage
  REGION 1..29: note = C-term amide
HXQGTFTSDYSKYLDEKAAKEFIEWLLQT

SEQ ID NO: 1075 - protein, 29 aa, synthetic construct
  REGION 1..29: note = Description of Artificial Sequence: Synthetic peptide
  MOD_RES 2: note = Aib
  REGION 16..20: note = misc_feature - Cyclic
  MOD_RES 16: note = Glu is cyclized through side chain to form a lactam linkage
  MOD_RES 17: note = Lys(Me14)
  MOD_RES 20: note = Lys is cyclized through side chain to form a lactam linkage
  REGION 1..29: note = C-term amide
HXQGTFTSDYSKYLDEKAAKEFIEWLLQT

SEQ ID NO: 1076 - protein, 29 aa, synthetic construct
  REGION 1..29: note = Description of Artificial Sequence: Synthetic peptide
  MOD_RES 2: note = Aib
  REGION 16..20: note = misc_feature - Cyclic
  MOD_RES 16: note = Glu is cyclized through side chain to form a lactam linkage
  MOD_RES 17: note = Lys(Me16)
  MOD_RES 20: note = Lys is cyclized through side chain to form a lactam linkage
  REGION 1..29: note = C-term amide
HXQGTFTSDYSKYLDEKAAKEFIEWLLQT

SEQ ID NO: 1077 - protein, 29 aa, synthetic construct
  REGION 1..29: note = Description of Artificial Sequence: Synthetic peptide
  MOD_RES 2: note = Aib
  REGION 16..20: note = misc_feature - Cyclic
  MOD_RES 16: note = Glu is cyclized through side chain to form a lactam linkage
  MOD_RES 17: note = Lys(Me18)
  MOD_RES 20: note = Lys is cyclized through side chain to form a lactam linkage
  REGION 1..29: note = C-term amide
HXQGTFTSDYSKYLDEKAAKEFIEWLLQT

SEQ ID NO: 1078 - protein, 29 aa, synthetic construct
  REGION 1..29: note = Description of Artificial Sequence: Synthetic peptide
  MOD_RES 2: note = Aib
  REGION 16..20: note = misc_feature - Cyclic
  MOD_RES 16: note = Glu is cyclized through side chain to form a lactam linkage
  MOD_RES 17: note = Lys(Z14)
  MOD_RES 20: note = Lys is cyclized through side chain to form a lactam linkage
  REGION 1..29: note = C-term amide
HXQGTFTSDYSKYLDEKAAKEFIEWLLQT

SEQ ID NO: 1079 - protein, 29 aa, synthetic construct
  REGION 1..29: note = Description of Artificial Sequence: Synthetic peptide
  MOD_RES 2: note = Aib
  REGION 16..20: note = misc_feature - Cyclic
  MOD_RES 16: note = Glu is cyclized through side chain to form a lactam linkage
  MOD_RES 17: note = Lys(Z16)
  MOD_RES 20: note = Lys is cyclized through side chain to form a lactam linkage
  REGION 1..29: note = C-term amide
HXQGTFTSDYSKYLDEKAAKEFIEWLLQT

SEQ ID NO: 1080 - protein, 29 aa, synthetic construct
  REGION 1..29: note = Description of Artificial Sequence: Synthetic peptide
  MOD_RES 2: note = Aib
  REGION 16..20: note = misc_feature - Cyclic
  MOD_RES 16: note = Glu is cyclized through side chain to form a lactam linkage
  MOD_RES 17: note = Lys(Z18)
  MOD_RES 20: note = Lys is cyclized through side chain to form a lactam linkage
  REGION 1..29: note = C-term amide
HXQGTFTSDYSKYLDEKAAKEFIEWLLQT

SEQ ID NO: 1081 - protein, 29 aa, synthetic construct
  REGION 1..29: note = Description of Artificial Sequence: Synthetic peptide
  MOD_RES 2: note = Aib
  REGION 10..14: note = misc_feature - Cyclic
  MOD_RES 10: note = Glu is cyclized through side chain to form a lactam linkage
  MOD_RES 14: note = Lys is cyclized through side chain to form a lactam linkage
  MOD_RES 20: note = Lys(Me14)
  REGION 1..29: note = C-term amide
HXQGTFTSDESKYKDSQAAKEFIEWLLQT

SEQ ID NO: 1082 - protein, 29 aa, synthetic construct
  REGION 1..29: note = Description of Artificial Sequence: Synthetic peptide
  MOD_RES 2: note = Aib
  REGION 10..14: note = misc_feature - Cyclic
  MOD_RES 10: note = Glu is cyclized through side chain to form a lactam linkage
  MOD_RES 14: note = Lys is cyclized through side chain to form a lactam linkage
  MOD_RES 20: note = Lys(Me16)
  REGION 1..29: note = C-term amide
HXQGTFTSDESKYKDSQAAKEFIEWLLQT

SEQ ID NO: 1083 - protein, 29 aa, synthetic construct
  REGION 1..29: note = Description of Artificial Sequence: Synthetic peptide
  MOD_RES 2: note = Aib
  REGION 10..14: note = misc_feature - Cyclic
  MOD_RES 10: note = Glu is cyclized through side chain to form a lactam linkage
  MOD_RES 14: note = Lys is cyclized through side chain to form a lactam linkage
  MOD_RES 20: note = Lys(Me18)
  REGION 1..29: note = C-term amide
HXQGTFTSDESKYKDSQAAKEFIEWLLQT

SEQ ID NO: 1084 - protein, 29 aa, synthetic construct
  REGION 1..29: note = Description of Artificial Sequence: Synthetic peptide
  MOD_RES 2: note = Aib
  REGION 10..14: note = misc_feature - Cyclic
  MOD_RES 10: note = Glu is cyclized through side chain to form a lactam linkage
  MOD_RES 14: note = Lys is cyclized through side chain to form a lactam linkage
  MOD_RES 20: note = Lys(Z14)
  REGION 1..29: note = C-term amide
HXQGTFTSDESKYKDSQAAKEFIEWLLQT

SEQ ID NO: 1085 - protein, 29 aa, synthetic construct
  REGION 1..29: note = Description of Artificial Sequence: Synthetic peptide
  MOD_RES 2: note = Aib
  REGION 10..14: note = misc_feature - Cyclic
  MOD_RES 10: note = Glu is cyclized through side chain to form a lactam linkage
  MOD_RES 14: note = Lys is cyclized through side chain to form a lactam linkage
  MOD_RES 20: note = Lys(Z16)
  REGION 1..29: note = C-term amide
HXQGTFTSDESKYKDSQAAKEFIEWLLQT

SEQ ID NO: 1086 - protein, 29 aa, synthetic construct
  REGION 1..29: note = Description of Artificial Sequence: Synthetic peptide
  MOD_RES 2: note = Aib
  REGION 10..14: note = misc_feature - Cyclic
  MOD_RES 10: note = Glu is cyclized through side chain to form a lactam linkage
  MOD_RES 14: note = Lys is cyclized through side chain to form a lactam linkage
  MOD_RES 20: note = Lys(Z18)
  REGION 1..29: note = C-term amide
HXQGTFTSDESKYKDSQAAKEFIEWLLQT

SEQ ID NO: 1087 - protein, 29 aa, synthetic construct
  REGION 1..29: note = Description of Artificial Sequence: Synthetic peptide
  MOD_RES 2: note = Aib
  REGION 10..14: note = misc_feature - Cyclic
  MOD_RES 10: note = Glu is cyclized through side chain to form a lactam linkage
  MOD_RES 14: note = Lys is cyclized through side chain to form a lactam linkage
  MOD_RES 20: note = Lys(Me14)
  REGION 1..29: note = C-term amide
HXQGTFTSDESKYKDSEAAKEFIEWLLQT

SEQ ID NO: 1088 - protein, 29 aa, synthetic construct
  REGION 1..29: note = Description of Artificial Sequence: Synthetic peptide
  MOD_RES 2: note = Aib
  REGION 10..14: note = misc_feature - Cyclic
  MOD_RES 10: note = Glu is cyclized through side chain to form a lactam linkage
  MOD_RES 14: note = Lys is cyclized through side chain to form a lactam linkage
  MOD_RES 20: note = Lys(Me16)
  REGION 1..29: note = C-term amide
HXQGTFTSDESKYKDSEAAKEFIEWLLQT

SEQ ID NO: 1089 - protein, 29 aa, synthetic construct
  REGION 1..29: note = Description of Artificial Sequence: Synthetic peptide
  MOD_RES 2: note = Aib
  REGION 10..14: note = misc_feature - Cyclic
  MOD_RES 10: note = Glu is cyclized through side chain to form a lactam linkage
  MOD_RES 14: note = Lys is cyclized through side chain to form a lactam linkage
  MOD_RES 20: note = Lys(Me18)
  REGION 1..29: note = C-term amide
HXQGTFTSDESKYKDSEAAKEFIEWLLQT

SEQ ID NO: 1090 - protein, 29 aa, synthetic construct
  REGION 1..29: note = Description of Artificial Sequence: Synthetic peptide
  MOD_RES 2: note = Aib
  REGION 10..14: note = misc_feature - Cyclic
  MOD_RES 10: note = Glu is cyclized through side chain to form a lactam linkage
  MOD_RES 14: note = Lys is cyclized through side chain to form a lactam linkage
  MOD_RES 20: note = Lys(Z14)
  REGION 1..29: note = C-term amide
HXQGTFTSDESKYKDSEAAKEFIEWLLQT

SEQ ID NO: 1091 - protein, 29 aa, synthetic construct
  REGION 1..29: note = Description of Artificial Sequence: Synthetic peptide
  MOD_RES 2: note = Aib
  REGION 10..14: note = misc_feature - Cyclic
  MOD_RES 10: note = Glu is cyclized through side chain to form a lactam linkage
  MOD_RES 14: note = Lys is cyclized through side chain to form a lactam linkage
  MOD_RES 20: note = Lys(Z16)
  REGION 1..29: note = C-term amide
HXQGTFTSDESKYKDSEAAKEFIEWLLQT

SEQ ID NO: 1092 - protein, 29 aa, synthetic construct
  REGION 1..29: note = Description of Artificial Sequence: Synthetic peptide
  MOD_RES 2: note = Aib
  REGION 10..14: note = misc_feature - Cyclic
  MOD_RES 10: note = Glu is cyclized through side chain to form a lactam linkage
  MOD_RES 14: note = Lys is cyclized through side chain to form a lactam linkage
  MOD_RES 20: note = Lys(Z18)
  REGION 1..29: note = C-term amide
HXQGTFTSDESKYKDSEAAKEFIEWLLQT

SEQ ID NO: 1093 - protein, 29 aa, synthetic construct
  REGION 1..29: note = Description of Artificial Sequence: Synthetic peptide
  MOD_RES 2: note = Aib
  REGION 10..14: note = misc_feature - Cyclic
  MOD_RES 10: note = Glu is cyclized through side chain to form a lactam linkage
  MOD_RES 14: note = Lys is cyclized through side chain to form a lactam linkage
  MOD_RES 20: note = Lys(Me14)
  REGION 1..29: note = C-term amide
HXQGTFTSDESKYKDSEAAKEFIQWLLQT

SEQ ID NO: 1094 - protein, 29 aa, synthetic construct
  REGION 1..29: note = Description of Artificial Sequence: Synthetic peptide
  MOD_RES 2: note = Aib
  REGION 10..14: note = misc_feature - Cyclic
  MOD_RES 10: note = Glu is cyclized through side chain to form a lactam linkage
  MOD_RES 14: note = Lys is cyclized through side chain to form a lactam linkage
  MOD_RES 20: note = Lys(Me16)
  REGION 1..29: note = C-term amide
HXQGTFTSDESKYKDSEAAKEFIQWLLQT

SEQ ID NO: 1095 - protein, 29 aa, synthetic construct
  REGION 1..29: note = Description of Artificial Sequence: Synthetic peptide
  MOD_RES 2: note = Aib
  REGION 10..14: note = misc_feature - Cyclic
  MOD_RES 10: note = Glu is cyclized through side chain to form a lactam linkage
  MOD_RES 14: note = Lys is cyclized through side chain to form a lactam linkage
  MOD_RES 20: note = Lys(Me18)
  REGION 1..29: note = C-term amide
HXQGTFTSDESKYKDSEAAKEFIQWLLQT

SEQ ID NO: 1096 - protein, 29 aa, synthetic construct
  REGION 1..29: note = Description of Artificial Sequence: Synthetic peptide
  MOD_RES 2: note = Aib
  REGION 10..14: note = misc_feature - Cyclic
  MOD_RES 10: note = Glu is cyclized through side chain to form a lactam linkage
  MOD_RES 14: note = Lys is cyclized through side chain to form a lactam linkage
  MOD_RES 20: note = Lys(Z14)
  REGION 1..29: note = C-term amide
HXQGTFTSDESKYKDSEAAKEFIQWLLQT

SEQ ID NO: 1097 - protein, 29 aa, synthetic construct
  REGION 1..29: note = Description of Artificial Sequence: Synthetic peptide
  MOD_RES 2: note = Aib
  REGION 10..14: note = misc_feature - Cyclic
  MOD_RES 10: note = Glu is cyclized through side chain to form a lactam linkage
  MOD_RES 14: note = Lys is cyclized through side chain to form a lactam linkage
  MOD_RES 20: note = Lys(Z16)
  REGION 1..29: note = C-term amide
HXQGTFTSDESKYKDSEAAKEFIQWLLQT

SEQ ID NO: 1098 - protein, 29 aa, synthetic construct
  REGION 1..29: note = Description of Artificial Sequence: Synthetic peptide
  MOD_RES 2: note = Aib
  REGION 10..14: note = misc_feature - Cyclic
  MOD_RES 10: note = Glu is cyclized through side chain to form a lactam linkage
  MOD_RES 14: note = Lys is cyclized through side chain to form a lactam linkage
  MOD_RES 20: note = Lys(Z18)
  REGION 1..29: note = C-term amide
HXQGTFTSDESKYKDSEAAKEFIQWLLQT

SEQ ID NO: 1099 - protein, 29 aa, synthetic construct
  REGION 1..29: note = Description of Artificial Sequence: Synthetic polypeptide
  MOD_RES 2: note = Aib
  REGION 10..14: note = misc_feature - Cyclic
  MOD_RES 10: note = Glu is cyclized through side chain to form a lactam linkage
  MOD_RES 14: note = Lys is cyclized through side chain to form a lactam linkage
  MOD_RES 17: note = Lys(Z12)
  MOD_RES 24: note = Lys(Z12)
  REGION 1..29: note = C-term amide
HXQGTFTSDESKYKDSKAAQEFIKWLLQT

SEQ ID NO: 1100 - protein, 29 aa, synthetic construct
  REGION 1..29: note = Description of Artificial Sequence: Synthetic polypeptide
  MOD_RES 2: note = Aib
  REGION 10..14: note = misc_feature - Cyclic
  MOD_RES 10: note = Glu is cyclized through side chain to form a lactam linkage
  MOD_RES 14: note = Lys is cyclized through side chain to form a lactam linkage
  MOD_RES 17: note = Lys(Z14)
  MOD_RES 24: note = Lys(Z14)
  REGION 1..29: note = C-term amide
HXQGTFTSDESKYKDSKAAQEFIKWLLQT

SEQ ID NO: 1101 - protein, 29 aa, synthetic construct
  REGION 1..29: note = Description of Artificial Sequence: Synthetic polypeptide
  MOD_RES 2: note = Aib
  REGION 10..14: note = misc_feature - Cyclic
  MOD_RES 10: note = Glu is cyclized through side chain to form a lactam linkage
  MOD_RES 14: note = Lys is cyclized through side chain to form a lactam linkage
  MOD_RES 17: note = Lys(Z16)
  MOD_RES 24: note = Lys(Z16)
  REGION 1..29: note = C-term amide
HXQGTFTSDESKYKDSKAAQEFIKWLLQT

SEQ ID NO: 1102 - protein, 29 aa, synthetic construct
  REGION 1..29: note = Description of Artificial Sequence: Synthetic polypeptide
  MOD_RES 2: note = Aib
  REGION 10..14: note = misc_feature - Cyclic
  MOD_RES 10: note = Glu is cyclized through side chain to form a lactam linkage
  MOD_RES 14: note = Lys is cyclized through side chain to form a lactam linkage
  MOD_RES 17: note = Lys(Z14CO2)
  REGION 1..29: note = C-term amide
HXQGTFTSDESKYKDSKAAQEFIQWLLQT

SEQ ID NO: 1103 - protein, 29 aa, synthetic construct
  REGION 1..29: note = Description of Artificial Sequence: Synthetic polypeptide
  MOD_RES 2: note = Aib
  REGION 10..14: note = misc_feature - Cyclic
  MOD_RES 10: note = Glu is cyclized through side chain to form a lactam linkage
  MOD_RES 14: note = Lys is cyclized through side chain to form a lactam linkage
  MOD_RES 17: note = Lys(Z16CO2)
  REGION 1..29: note = C-term amide
HXQGTFTSDESKYKDSKAAQEFIQWLLQT

SEQ ID NO: 1104 - protein, 29 aa, synthetic construct
  REGION 1..29: note = Description of Artificial Sequence: Synthetic polypeptide
  MOD_RES 2: note = Aib
  REGION 10..14: note = misc_feature - Cyclic
  MOD_RES 10: note = Glu is cyclized through side chain to form a lactam linkage
  MOD_RES 14: note = Lys is cyclized through side chain to form a lactam linkage
  MOD_RES 17: note = Lys(Z18CO2)
  REGION 1..29: note = C-term amide
HXQGTFTSDESKYKDSKAAQEFIQWLLQT

SEQ ID NO: 1105 - protein, 29 aa, synthetic construct
  REGION 1..29: note = Description of Artificial Sequence: Synthetic polypeptide
  MOD_RES 2: note = Aib
  REGION 10..14: note = misc_feature - Cyclic
  MOD_RES 10: note = Glu is cyclized through side chain to form a lactam linkage
  MOD_RES 14: note = Lys is cyclized through side chain to form a lactam linkage
  MOD_RES 24: note = Lys(Z14CO2)
  REGION 1..29: note = C-term amide
HXQGTFTSDESKYKDSQAAQEFIKWLLQT

SEQ ID NO: 1106 - protein, 29 aa, synthetic construct
  REGION 1..29: note = Description of Artificial Sequence: Synthetic polypeptide
  MOD_RES 2: note = Aib
  REGION 10..14: note = misc_feature - Cyclic
  MOD_RES 10: note = Glu is cyclized through side chain to form a lactam linkage
  MOD_RES 14: note = Lys is cyclized through side chain to form a lactam linkage
  MOD_RES 24: note = Lys(Z16CO2)
  REGION 1..29: note = C-term amide
HXQGTFTSDESKYKDSQAAQEFIKWLLQT

SEQ ID NO: 1107 - protein, 29 aa, synthetic construct
  REGION 1..29: note = Description of Artificial Sequence: Synthetic polypeptide
  MOD_RES 2: note = Aib
  REGION 10..14: note = misc_feature - Cyclic
  MOD_RES 10: note = Glu is cyclized through side chain to form a lactam linkage
  MOD_RES 14: note = Lys is cyclized through side chain to form a lactam linkage
  MOD_RES 24: note = Lys(Z18CO2)
  REGION 1..29: note = C-term amide
HXQGTFTSDESKYKDSQAAQEFIKWLLQT

SEQ ID NO: 1108-1109 - skipped (2 entries)

SEQ ID NO: 1110 - protein, 29 aa, synthetic construct
  REGION 1..29: note = Description of Artificial Sequence: Synthetic peptide
  MOD_RES 2: note = Aib
  MOD_RES 10: note = Tyr, Glu, Lys or U(X); wherein "U" is any natural or unnatural amino acid comprising a functional group used for covalent attachment to the surfactant X
  MOD_RES 12: note = Lys or Glu
  MOD_RES 14: note = Leu, Glu or Lys
  MOD_RES 16: note = Glu or Lys
  MOD_RES 17: note = Gln, Glu or U(X); wherein "U" is any natural or unnatural amino acid comprising a functional group used for covalent attachment to the surfactant X
  MOD_RES 20: note = Glu, Lys or U(X); wherein "U" is any natural or unnatural amino acid comprising a functional group used for covalent attachment to the surfactant X
  MOD_RES 24: note = Gln, Glu or U(X); wherein "U" is any natural or unnatural amino acid comprising a functional group used for covalent attachment to the surfactant X
  MOD_RES 28: note = Glu or Gln
  REGION 1..29: note = -OH or -NH-R3
  REGION 1..29: note = See specification as filed for detailed description of substitutions and preferred embodiments
HXQGTFTSDXSXYXDXXAAXEFIXWLLXT

SEQ ID NO: 1111 - protein, 30 aa, synthetic construct; identical to SEQ ID NO: 3
  REGION 1..30: note = Description of Artificial Sequence: Synthetic polypeptide
  MOD_RES 2: note = Gly, MePro or Aib
  MOD_RES 3: note = Gln or Cit
  MOD_RES 6: note = Phe, 2FPhe, MePhe, 2FMePhe, or Nal2
  MOD_RES 10: note = Tyr, Nal2, Bip, Bip2EtMeO, Glu, Lys or U(X); wherein "U" is any natural or unnatural amino acid comprising a functional group used for covalent attachment to the surfactant X
  MOD_RES 11: note = absent, Ser, Asn, Bip or U(X); wherein "U" is any natural or unnatural amino acid comprising a functional group used for covalent attachment to the surfactant X
  MOD_RES 12: note = absent or Lys, Glu, Ser or U(X); wherein "U" is any natural or unnatural amino acid comprising a functional group used for covalent attachment to the surfactant X
  MOD_RES 13: note = absent or Tyr, Gln, Cit or U(X); wherein "U" is any natural or unnatural amino acid comprising a functional group used for covalent attachment to the surfactant X
  MOD_RES 14: note = absent or Leu, Nle, Glu, Lys or U(X); wherein "U" is any natural or unnatural amino acid comprising a functional group used for covalent attachment to the surfactant X
  MOD_RES 15: note = absent or Asp, Glu or U(X); wherein "U" is any natural or unnatural amino acid comprising a functional group used for covalent attachment to the surfactant X
  MOD_RES 16: note = absent or Ser, Gly, Glu, Ala, Aib, Lys, Arg or U(X); wherein "U" is any natural or unnatural amino acid comprising a functional group used for covalent attachment to the surfactant X
  MOD_RES 17: note = absent or Arg, hArg, Gln, Glu, Lys, Cit, Aib or U(X); wherein "U" is any natural or unnatural amino acid comprising a functional group used for covalent attachment to the surfactant X
  MOD_RES 18: note = absent or Arg, hArg, Ala, Aib, Ac4c, Ac5c or U(X); wherein "U" is any natural or unnatural amino acid comprising a functional group used for covalent attachment to the surfactant X
  MOD_RES 19: note = absent or Ala, Aib or U(X); wherein "U" is any natural or unnatural amino acid comprising a functional group used for covalent attachment to the surfactant X
  MOD_RES 20: note = absent or Gln, Lys, Arg, Cit, Glu, Aib or U(X); wherein "U" is any natural or unnatural amino acid comprising a functional group used for covalent attachment to the surfactant X
  MOD_RES 21: note = absent or Asp, Glu, Leu, Aib or U(X); wherein "U" is any natural or unnatural amino acid comprising a functional group used for covalent attachment to the surfactant X
  MOD_RES 22: note = absent or Phe or U(X); wherein "U" is any natural or unnatural amino acid comprising a functional group used for covalent attachment to the surfactant X
  MOD_RES 23: note = absent or Val, Ile, Aib or U(X); wherein "U" is any natural or unnatural amino acid comprising a functional group used for covalent attachment to the surfactant X
  MOD_RES 24: note = absent or Ala, Glu, Gln or U(X); wherein "U" is any natural or unnatural amino acid comprising a functional group used for covalent attachment to the surfactant X
  MOD_RES 25: note = absent or Trp or U(X); wherein "U" is any natural or unnatural amino acid comprising a functional group used for covalent attachment to the surfactant X
  MOD_RES 26: note = absent or Leu or U(X); wherein "U" is any natural or unnatural amino acid comprising a functional group used for covalent attachment to the surfactant X
  MOD_RES 27: note = absent or Met, Val, Leu, Nle, Lys or U(X); wherein "U" is any natural or unnatural amino acid comprising a functional group used for covalent attachment to the surfactant X
  MOD_RES 28: note = absent or Asn, Glu, Gln, Cit or U(X); wherein "U" is any natural or unnatural amino acid comprising a functional group used for covalent attachment to the surfactant X
  MOD_RES 29: note = absent or Thr, Aib or U(X); wherein "U" is any natural or unnatural amino acid comprising a functional group used for covalent attachment to the surfactant X
  MOD_RES 30: note = absent or Arg or U(X); wherein "U" is any natural or unnatural amino acid comprising a functional group used for covalent attachment to the surfactant X
  REGION 1..30: note = C-term OH or -NH-R3
  REGION 1..30: note = See specification as filed for detailed description of substitutions and preferred embodiments

SEQ ID NO: 1112 - protein, 11 aa, synthetic construct
  REGION 1..11: note = Description of Artificial Sequence: Synthetic peptide
  MOD_RES 2: note = Aib
  MOD_RES 6: note = Alpha-MeF
  MOD_RES 10: note = Bip
  MOD_RES 11: note = Lys(C20)
HXQGTXTSDXK

SEQ ID NO: 1113 - protein, 29 aa, synthetic construct
  REGION 1..29: note = Description of Artificial Sequence: Synthetic peptide
  MOD_RES 2: note = Aib
  MOD_RES 16: note = Glu cyclized through their side chains to form a lactam linkage
  MOD_RES 20: note = Lys cyclized through their side chains to form a lactam linkage
  MOD_RES 24: note = Lys(N-omega-X)
HXQGTFTSDYSKYLDEQAAKEFIKWLLQT

SEQ ID NO: 1114 - protein, 29 aa, synthetic construct
  REGION 1..29: note = Description of Artificial Sequence: Synthetic peptide
  MOD_RES 2: note = Aib
  REGION 16..20: note = misc_feature - Cyclic
  MOD_RES 16: note = Glu cyclized through their side chains to form a lactam linkage
  MOD_RES 17: note = Lys(N-omega(1-dodecyl alpha-D-melibiouronyl))
  MOD_RES 20: note = Lys cyclized through their side chains to form a lactam linkage
  MOD_RES 24: note = Lys(N-omega(1-dodecyl beta-D-glucouronyl))
  REGION 1..29: note = C-term amide
HXQGTFTSDYSKYLDEXAAKEFIXWLLQT

SEQ ID NO: 1115 - protein, 29 aa, synthetic construct
  REGION 1..29: note = Description of Artificial Sequence: Synthetic peptide
  MOD_RES 2: note = Aib
  REGION 16..20: note = misc_feature - Cyclic
  MOD_RES 16: note = Glu cyclized through their side chains to form a lactam linkage
  MOD_RES 17: note = Lys(N-omega(1-tetradecyl alpha-D-melibiouronyl))
  MOD_RES 20: note = Lys cyclized through their side chains to form a lactam linkage
  MOD_RES 24: note = Lys(N-omega(1-tetradecyl beta-D-glucouronyl))
  REGION 1..29: note = C-term amide
HXQGTFTSDYSKYLDEXAAKEFIXWLLQT

SEQ ID NO: 1116 - protein, 29 aa, synthetic construct
  REGION 1..29: note = Description of Artificial Sequence: Synthetic peptide
  MOD_RES 2: note = Aib
  REGION 16..20: note = misc_feature - Cyclic
  MOD_RES 16: note = Glu cyclized through their side chains to form a lactam linkage
  MOD_RES 17: note = Lys(N-omega(1-hexadecyl alpha-D-melibiouronyl))
  MOD_RES 20: note = Lys cyclized through their side chains to form a lactam linkage
  MOD_RES 24: note = Lys(N-omega(1-hexadecyl beta-D-glucouronyl))
  REGION 1..29: note = C-term amide
HXQGTFTSDYSKYLDEXAAKEFIXWLLQT

SEQ ID NO: 1117 - protein, 29 aa, synthetic construct
  REGION 1..29: note = Description of Artificial Sequence: Synthetic peptide
  MOD_RES 2: note = Aib
  REGION 16..20: note = misc_feature - Cyclic
  MOD_RES 16: note = Glu cyclized through their side chains to form a lactam linkage
  MOD_RES 17: note = Lys(N-omega(1-(13-carboxyl-tridecyloxy) beta-D-glucuronyl))
  MOD_RES 20: note = Lys cyclized through their side chains to form a lactam linkage
  REGION 1..29: note = C-term amide
HXQGTFTSDYSKYLDEXAAKEFIQWLLQT

SEQ ID NO: 1118 - protein, 29 aa, synthetic construct
  REGION 1..29: note = Description of Artificial Sequence: Synthetic peptide
  MOD_RES 2: note = Aib
  REGION 16..20: note = misc_feature - Cyclic
  MOD_RES 16: note = Glu cyclized through their side chains to form a lactam linkage
  MOD_RES 17: note = Lys(N-omega(1-(15-carboxyl-pentadecyloxy) beta-D-glucuronyl))
  MOD_RES 20: note = Lys cyclized through their side chains to form a lactam linkage
  REGION 1..29: note = C-term amide
HXQGTFTSDYSKYLDEXAAKEFIQWLLQT

SEQ ID NO: 1119 - protein, 29 aa, synthetic construct
  REGION 1..29: note = Description of Artificial Sequence: Synthetic peptide
  MOD_RES 2: note = Aib
  REGION 16..20: note = misc_feature - Cyclic
  MOD_RES 16: note = Glu cyclized through their side chains to form a lactam linkage
  MOD_RES 17: note = Lys(N-omega(1-(17-carboxyl-heptadecyloxy) beta-D-glucuronyl))
  MOD_RES 20: note = Lys cyclized through their side chains to form a lactam linkage
  REGION 1..29: note = C-term amide
HXQGTFTSDYSKYLDEXAAKEFIQWLLQT

SEQ ID NO: 1120 - protein, 29 aa, synthetic construct
  REGION 1..29: note = Description of Artificial Sequence: Synthetic peptide
  MOD_RES 2: note = Aib
  REGION 16..20: note = misc_feature - Cyclic
  MOD_RES 16: note = Glu cyclized through their side chains to form a lactam linkage
  MOD_RES 20: note = Lys cyclized through their side chains to form a lactam linkage
  MOD_RES 24: note = Lys(N-omega(1-(13-carboxyl-tridecyloxy) beta-D-glucuronyl))
  REGION 1..29: note = C-term amide
HXQGTFTSDYSKYLDEQAAKEFIXWLLQT

SEQ ID NO: 1121 - protein, 29 aa, synthetic construct
  REGION 1..29: note = Description of Artificial Sequence: Synthetic peptide
  MOD_RES 2: note = Aib
  REGION 16..20: note = misc_feature - Cyclic
  MOD_RES 16: note = Glu cyclized through their side chains to form a lactam linkage
  MOD_RES 20: note = Lys cyclized through their side chains to form a lactam linkage
  MOD_RES 24: note = Lys(N-omega(1-(15-carboxyl-pentadecyloxy) beta-D-glucuronyl))
  REGION 1..29: note = C-term amide
HXQGTFTSDYSKYLDEQAAKEFIXWLLQT

SEQ ID NO: 1122 - protein, 29 aa, synthetic construct
  REGION 1..29: note = Description of Artificial Sequence: Synthetic peptide
  MOD_RES 2: note = Aib
  REGION 16..20: note = misc_feature - Cyclic
  MOD_RES 16: note = Glu cyclized through their side chains to form a lactam linkage
  MOD_RES 20: note = Lys cyclized through their side chains to form a lactam linkage
  MOD_RES 24: note = Lys(N-omega(1-(17-carboxyl-heptadecyloxy) beta-D-glucuronyl))
  REGION 1..29: note = C-term amide
HXQGTFTSDYSKYLDEQAAKEFIXWLLQT

SEQ ID NO: 1123 - protein, 30 aa, synthetic construct
  REGION 1..30: note = Description of Artificial Sequence: Synthetic polypeptide
HAEGTFTSDVSSYLEGQAAKEFIAWLVKGR

SEQ ID NO: 1124 - protein, 17 aa, synthetic construct
  REGION 1..17: note = Description of Artificial Sequence: Synthetic peptide
  REGION 1..17: note = N-term Fmoc
  MOD_RES 2: note = Aib
  MOD_RES 10: note = Bip
  MOD_RES 17: note = Lys(Alloc)
HXQGTFTSDXSKYLESK

SEQ ID NO: 1125 - protein, 29 aa, synthetic construct
  REGION 1..29: note = Description of Artificial Sequence: Synthetic peptide
  REGION 1..29: note = N-term Boc
  MOD_RES 1: note = His(Trt)
  MOD_RES 2: note = Aib
  MOD_RES 3: note = Gln(Trt)
  MOD_RES 5: note = Thr(tBu)
  MOD_RES 7: note = Thr(tBu)
  MOD_RES 8: note = Ser(tBu)
  MOD_RES 9: note = Asp(OtBu)
  MOD_RES 10: note = Tyr(tBu)
  MOD_RES 11: note = Ser(tBu)
  MOD_RES 12: note = Lys(Boc)
  MOD_RES 13: note = Tyr(tBu)
  MOD_RES 15: note = Asp(OtBu)
  MOD_RES 16: note = Glu(O-Allyl)
  MOD_RES 17: note = Gln(Trt)
  MOD_RES 20: note = Lys(Alloc)
  MOD_RES 21: note = Glu(O-tBu)
  MOD_RES 24: note = Lys(Dde)
  MOD_RES 25: note = Trp(Boc)
  MOD_RES 28: note = Gln(Trt)
  MOD_RES 29: note = Thr(tBu)
  REGION 1..29: note = C-term HMPA
HXQGTFTSDYSKYLDEQAAKEFIKWLLQT

SEQ ID NO: 1126 - protein, 29 aa, synthetic construct
  REGION 1..29: note = Description of Artificial Sequence: Synthetic peptide
  MOD_RES 2: note = Gly or Aib
  MOD_RES 16: note = Glu, Ser, Ala, Lys, or Aib
  MOD_RES 17: note = Gln, Lys or U(X); wherein "U" is any natural or unnatural amino acid comprising a functional group used for covalent attachment to the surfactant X
  MOD_RES 20: note = Lys, Glu, or Arg
  MOD_RES 23: note = Ile or Val
  MOD_RES 24: note = Ala, Gln or U(X); wherein "U" is any natural or unnatural amino acid comprising a functional group used for covalent attachment to the surfactant X
  MOD_RES 27: note = Met, Val, or Leu
  MOD_RES 28: note = Asn, Gln or U(X); wherein "U" is any natural or unnatural amino acid comprising a functional group used for covalent attachment to the surfactant X
HXQGTFTSDYSKYLDXXAAXEFXXWLXXT

SEQ ID NO: 1127 - protein, 29 aa, synthetic construct
  REGION 1..29: note = Description of Artificial Sequence: Synthetic peptide
  MOD_RES 2: note = Gly or Aib
  MOD_RES 16: note = Glu, Ala, or Aib
  MOD_RES 17: note = Arg, hArg, or Gln
  MOD_RES 20: note = Lys or U(X); wherein "U" is any natural or unnatural amino acid comprising a functional group used for covalent attachment to the surfactant X
  MOD_RES 23: note = Ile or Val
  MOD_RES 24: note = Gln or Ala
  MOD_RES 27: note = Leu or Val
  MOD_RES 28: note = Asn or Gln
HXQGTFTSDYSKYLDXXRAXDFXXWLXXT

SEQ ID NO: 1128 - protein, 11 aa, synthetic construct
  REGION 1..11: note = Description of Artificial Sequence: Synthetic peptide
  MOD_RES 2: note = Gly, Aib, or MePro
  MOD_RES 6: note = Phe, 2FPhe, MePhe, or 2FMePhe
  MOD_RES 10: note = Tyr, Nal2, Bip, or Bip2EtMeO
  MOD_RES 11: note = Lys or Lys(N-omega-X)
HXQGTXTSDXK

SEQ ID NO: 1129 - protein, 11 aa, synthetic construct
  REGION 1..11: note = Description of Artificial Sequence: Synthetic peptide
  MOD_RES 2: note = Aib
  MOD_RES 6: note = alpha-MeFF
  MOD_RES 10: note = Bip
  MOD_RES 11: note = Lys(C8)
HXQGTXTSDXK

SEQ ID NO: 1130 - protein, 11 aa, synthetic construct
  REGION 1..11: note = Description of Artificial Sequence: Synthetic peptide
  MOD_RES 2: note = Aib
  MOD_RES 6: note = Alpha-MeFF
  MOD_RES 10: note = Bip
  MOD_RES 11: note = Lys(C12)
HXQGTXTSDXK

SEQ ID NO: 1131 - protein, 11 aa, synthetic construct
  REGION 1..11: note = Description of Artificial Sequence: Synthetic peptide
  MOD_RES 2: note = Aib
  MOD_RES 6: note = Alpha-MeFF
  MOD_RES 10: note = Bip
  MOD_RES 11: note = Lys(C14)
HXQGTXTSDXK

SEQ ID NO: 1132 - protein, 11 aa, synthetic construct
  REGION 1..11: note = Description of Artificial Sequence: Synthetic peptide
  MOD_RES 2: note = Aib
  MOD_RES 6: note = Alpha-MeFF
  MOD_RES 10: note = Bip
  MOD_RES 11: note = Lys(C14)
HXQGTXTSDXK

SEQ ID NO: 1133 - protein, 11 aa, synthetic construct
  REGION 1..11: note = Description of Artificial Sequence: Synthetic peptide
  MOD_RES 2: note = Aib
  MOD_RES 6: note = Alpha-MeFF
  MOD_RES 10: note = Bip
  MOD_RES 11: note = Lys(C18)
HXQGTXTSDXK

SEQ ID NO: 1134 - protein, 11 aa, synthetic construct
  REGION 1..11: note = Description of Artificial Sequence: Synthetic peptide
  MOD_RES 2: note = Aib
  MOD_RES 6: note = Alpha-MeFF
  MOD_RES 10: note = Bip
  MOD_RES 11: note = Lys(C20)
HXQGTXTSDXK

SEQ ID NO: 1135 - protein, 29 aa, synthetic construct
  REGION 1..29: note = Description of Artificial Sequence: Synthetic peptide
  MOD_RES 17: note = Lys(C8)
HGQGTFTSDYSKYLDAKAAREFIAWLLNT

SEQ ID NO: 1136 - protein, 29 aa, synthetic construct
  REGION 1..29: note = Description of Artificial Sequence: Synthetic peptide
  MOD_RES 17: note = Lys(C12)
HGQGTFTSDYSKYLDAKAAREFIAWLLNT

SEQ ID NO: 1137 - protein, 29 aa, synthetic construct
  REGION 1..29: note = Description of Artificial Sequence: Synthetic peptide
  MOD_RES 17: note = Lys(C14)
HGQGTFTSDYSKYLDAKAAREFIAWLLNT
